(19) United States
(12) Patent Application Publication
(10) Pub. No.: US 2026/0166181 A1
(43) Pub. Date: Jun. 18, 2026

(54) COMPOSITIONS AND METHODS FOR TREATING AMYOTROPHIC LATERAL SCLEROSIS AND DISORDERS ASSOCIATED WITH THE SPINAL CORD

(71) Applicant: Voyager Therapeutics, Inc., Lexington, MA (US)

(72) Inventors: Mathieu Emmanuel NONNENMACHER, Boston, MA (US); Mathew Alan CHILD, Ashland, MA (US); Jinzhao HOU, Lexington, MA (US); Jiangyu LI, Watertown, MA (US); Shaoyong LI, Hopkinton, MA (US); Tyler Christopher MOYER, Boston, MA (US); Wei WANG, Arlington, MA (US); Cansu COLPAN, North Billerica, MA (US); Michael D. GRANNAN, Medford, MA (US); Brett HOFFMAN, Braintree, MA (US); Elisabeth KNOLL, Melrose, MA (US); Yanqun SHU, Winchester, MA (US); Nilesh Navalkishor PANDE, North Grafton, MA (US); Jeffrey Scott THOMPSON, Stoneham, MA (US)

(21) Appl. No.: 18/711,046

(22) PCT Filed: Nov. 17, 2022
(86) PCT No.: PCT/US2022/080035

§ 371 Date: May 16, 2024

Related U.S. Application Data
(60) Provisional application No. 63/280,582, filed on Nov. 17, 2021.
(60) Provisional application No. 63/341,274, filed on May 12, 2022.

(51) Int. Cl. A61K 48/00; C12N 15/113; C12N 15/86

(52) U.S. Cl. CPC A61K 48/0066; C12N 15/1137; C12N 15/86; C12N 2750/14143; C12N 2750/14152

(57) ABSTRACT

The present disclosure relates to AAVs encoding a SOD1 targeting polynucleotide which may be used to treat amyotrophic lateral sclerosis (ALS) and delivery methods for the treatment of spinal cord related disorders including ALS.

### RELATED APPLICATION

[0001] This application claims priority to U.S. Provisional Application No. 63/280,582 filed on Nov. 17, 2021, and to U.S. Provisional Application No. 63/341,274 filed on May 12, 2022; the entire contents each of which are hereby incorporated by reference in their entirety.

### FIELD OF THE DISCLOSURE

[0002] The present disclosure relates to compositions, preparation, use, and/or formulation of adeno-associated virus (AAV) capsid proteins and variants thereof, for the delivery of a SOD1 targeting polynucleotide, e.g., small interfering RNA (siRNA) duplexes, shRNA, microRNA (miRNA), or precursors thereof which target or encode molecules which target the superoxide dismutase 1 (SOD1) gene to interfere with SOD1 gene expression and/or SOD1 enzyme production. Methods for inhibiting SOD1 or altering the expression of any gene associated with a spinal cord related disease or disorder in a subject with a disease and/or other disorder associated with the spinal cord are also disclosed. The method includes the administration of the at least one polynucleotide into the subject with a disorder associated with the spinal cord (e.g., neurodegenerative disease) via at least intravenous injection or via intra-cisterna magna injection. In these embodiments the disease is a motor neuron disease, and more specifically, the disease is amyotrophic lateral sclerosis (ALS).

### BACKGROUND

[0003] Amyotrophic lateral sclerosis (ALS), also known as Lou Gehrig's disease, is a fatal progressive neurodegenerative disease, characterized by the predominant loss of upper and lower motor neurons (MNs) in primary motor cortex, the brainstem, and the spinal cord. Upper (e.g., cortical) and lower motor neurons (e.g., spinal cord) normally communicate messages from the brain to the muscles to generate voluntary movement. When these neurons degenerate and/or die, the loss of the message to the muscles results in a gradual weakening and/or atrophy of the muscle and inability to initiate or control voluntary movements, until ultimately, an individual suffering from ALS loses muscle strength and the ability to move, speak, eat and even breathe. Most patients will require some form of breathing aid for survival, and even then, most ALS patients die as a result of respiratory failure within 2-5 years of diagnosis. During disease progression, some patients (e.g., FTD-ALS) may also develop frontotemporal dementia.

[0004] Two forms of ALS have been described: one is sporadic ALS (sALS), which is the most common form of ALS in the United States of America and accounts for 90 to 95% of all cases diagnosed; the other is familial ALS (fALS), which occurs in a family lineage mainly with a dominant inheritance and only accounts for about 5 to 10% of all cases in the United States of America. sALS and fALS are clinically indistinguishable.

[0005] Pathological studies have linked numerous cellular processes with disease pathogenesis such as increased ER stress, generation of free radicals (i.e., reactive oxygen species (ROS)), mitochondrial dysfunction, protein aggregation, apoptosis, inflammation and glutamate excitotoxicity, specifically in the motor neurons (MNs).

[0006] The causes of ALS are complicated and heterogeneous. In general, ALS is considered to be a complex genetic disorder in which multiple genes in combination with environmental exposures combine to render a person susceptible. More than a dozen genes associated with ALS have been discovered, including, SOD1 (Cu²⁺/Zn²⁺ superoxide dismutase), TDP-43 (TARDBP, TAR DNA binding protein-43), FUS (Fused in Sarcoma/Translocated in Sarcoma), ANG (Angiogenin), ATXN2 (Ataxin-2), valosin containing protein (VCP), OPTN (Optineurin) and an expansion of the noncoding GGGGCC hexanucleotide repeat in the chromosome 9, open reading frame 72 (C90RF72). However, the exact mechanisms of motor neuron degeneration are still elusive.

[0007] Currently, there is no curative treatment for ALS.

[0008] SOD1 can be a potential therapeutic target for both familial and sporadic ALS. A therapy that can reduce the SOD1 protein, whether wildtype or mutant, produced in the central nervous system of ALS patients may ameliorate the symptoms of ALS in patients such as motor neuron degeneration and muscle weakness and atrophy. Agents and methods that aim to prevent the formation of wild type and/or mutant SOD1 protein aggregation may prevent disease progression and allow for amelioration of ALS symptoms. RNA interfering (RNAi) mediated gene silencing has drawn researchers' interest in recent years. Small double stranded RNA (small interfering RNA) molecules that target the SOD1 gene have been taught in the art for their potential in treating ALS (See, e.g., U.S. Pat. No. 7,632,938 and U.S. Patent Publication No. 20060229268).

### SUMMARY

[0009] The present disclosure provides AAV particles encoding a SOD1 targeting polynucleotide to interfere with SOD1 gene expression and/or SOD1 protein production and methods of use thereof. Methods for treating diseases associated with motor neuron degeneration such as amyotrophic lateral sclerosis are also included in the present disclosure.

[0010] In one aspect, the present disclosure provides an isolated, e.g., recombinant, AAV particle comprising an AAV capsid variant and a nucleic acid comprising a transgene encoding SOD1 targeting polynucleotide (e.g., a SOD1 targeting RNA agent, e.g., a siRNA duplex), wherein the AAV capsid variant: (i) is enriched at least about 5, 6, 7, 8, 9, 10, 20, 30, 40, 50, 100, 200, 300, or 400-fold, in the brain, e.g., the brain of a non-human primate (NHP) compared to a reference sequence of SEQ ID NO: 138 (e.g., as provided in Table 20), e.g., when measured by an assay as described in Example 2; (ii) transduces a brain region, e.g., a brain region of an NHP, e.g., selected from dentate nucleus, cerebellar cortex, cerebral cortex, brain stem, hippocampus, thalamus and putamen, wherein the level of transduction is at least 5, 10, 50, 100, 200, 500, 1,000, 2,000, 5,000, or 10,000-fold greater as compared to a reference sequence of SEQ ID NO: 138, e.g., when measured by an assay, e.g., an immunohistochemistry assay, a qRT-PCR, or a RT-ddPCR assay, e.g., as described in Example 3; (iii) delivers an increased level of a payload to a brain region, e.g., a brain region of an NHP, optionally wherein the level of the payload is increased by at least 500, 1,000, 2,000, 5,000, or 10,000-fold, as compared to a reference sequence of SEQ ID NO: 138, e.g., when measured by an assay, e.g., a qRT-PCR or a RT-ddPCR assay (e.g., as described in Example 3), optionally wherein the brain region comprises a frontal cortex, sensory cortex, motor cortex, putamen, thalamus, cerebellar cortex, dentate nucleus, caudate, and/or hippocampus; (iv) delivers an increased level of a payload to a spinal cord region, e.g., a spinal cord region of an NHP, optionally wherein the level of the payload is increased by at least 10, 20, 50, 100, 200, 300, 400, 500, 600, 700, 800 or 900-fold, as compared to a reference sequence of SEQ ID NO: 138, e.g., when measured by an assay, e.g., a qRT-PCR assay (e.g., as described in Example 3), optionally wherein the spinal cord region comprises a cervical, thoracic, and/or lumbar region; and/or (v) delivers an increased level of viral genomes to a brain region, e.g., a brain region of an NHP, optionally wherein the level of viral genomes is increased by at least 5, 10, 20, 30, 40 or 50-fold, as compared to a reference sequence of SEQ ID NO: 138, e.g., when measured by an assay, e.g., a qRT-PCR or a RT-ddPCR assay (e.g., as described in Example 3), optionally wherein the brain region comprises a frontal cortex, sensory cortex, motor cortex, putamen, thalamus, cerebellar cortex, dentate nucleus, caudate, and/or hippocampus.

[0011] In another aspect, the present disclosure provides an isolated, e.g., recombinant, AAV particle comprising an AAV capsid variant and a nucleic acid comprising a transgene encoding a SOD1 targeting polynucleotide (e.g., a SOD1 targeting RNA agent), wherein the AAV capsid variant comprises: (a) the amino acid sequence of any of SEQ ID NO: 3648-3659 or a sequence provided in Table 20; (b) an amino acid sequence comprising at least 5, 6, 7, 8, or 9 consecutive amino acids from the amino acid sequence of any of SEQ ID NO: 3648-3659 or a sequence provided in Table 20; (c) an amino acid sequence comprising at least one, two, or three but no more than four modifications, e.g., substitutions, (e.g., conservative substitutions), insertions, or deletions, relative to the amino acid sequence of any of 3648-3659 or a sequence provided in Table 20; or (d) an amino acid sequence comprising at least one, two, or three but no more than four different amino acids relative to the amino acid sequence of any of 3648-3659 or a sequence provided in Table 20; optionally wherein the capsid variant comprises the amino acid sequence of SEQ ID NO: 138, or an amino acid sequence with at least 95% sequence identity thereto.

[0012] In a further aspect, the present disclosure provides an isolated, e.g., recombinant, AAV particle comprising an AAV capsid variant and a nucleic acid comprising a transgene encoding a SOD1 targeting polynucleotide (e.g., a SOD1 targeting RNA agent), wherein the AAV capsid variant comprises: (i) the amino acid sequence of PLNGAVHLY (SEQ ID NO: 3648); (ii) an amino acid sequence comprising at least 5, 6, 7, 8, or 9 consecutive amino acids from the amino acid sequence of PLNGAVHLY (SEQ ID NO: 3648); (iii) an amino acid sequence comprising at least one, two, or three but no more than four modifications, e.g., substitutions (e.g., conservative substitutions), insertions, or deletions, relative to the amino acid sequence of PLNGAVHLY (SEQ ID NO: 3648); or (iv) an amino acid sequence comprising at least one, two, or three but no more than four different amino acids relative to the amino acid sequence of PLNGAVHLY (SEQ ID NO: 3648); optionally wherein the capsid variant comprises the amino acid sequence of SEQ ID NO: 138, or an amino acid sequence with at least 95% sequence identity thereto.

[0013] In yet another aspect, the present disclosure provides an isolated, e.g., recombinant, AAV particle comprising an AAV capsid variant and a nucleic acid comprising a transgene encoding a SOD1 targeting polynucleotide (e.g., a SOD1 targeting RNA agent), wherein the AAV capsid variant comprises an amino sequence comprising the following formula: [N1]-[N2], wherein: (i) [N1] comprises X1, X2, X3, X4, and X5, wherein: (a) position X1 is: P, Q, A, H, K, L, R, S, or T; (b) position X2 is: L, I, V, H, or R; (c) position X3 is: N, D, I, K, or Y; (d) position X4 is: G, A, C, R, or S; and (e) position X5 is: A, S, T, G, C, D, N, Q, V, or Y; and (ii) [N2] comprises the amino acid sequence of VHLY (SEQ ID NO: 3741), VHIY (SEQ ID NO: 3746), VHVY (SEQ ID NO: 3742), or VHHY (SEQ ID NO: 3747); and/or an amino acid modification, e.g., a conservative substitution, of any of the aforesaid amino acids in (i) and/or (ii).

[0014] In yet another aspect, the present disclosure provides an isolated, e.g., recombinant, AAV particle comprising an AAV capsid variant and a nucleic acid comprising a transgene encoding a SOD1 targeting polynucleotide (e.g., a SOD1 targeting RNA agent), wherein the AAV capsid variant comprises one, two, three, four, or all of: (i) an [N1], wherein [N1] is or comprises: SLNGA (SEQ ID NO: 3702), QLNGA (SEQ ID NO: 3703), ALNGA (SEQ ID NO: 3704), PLNGS (SEQ ID NO: 3705), PVNGA (SEQ ID NO: 3706), PLNGA (SEQ ID NO: 3679), PLNGG (SEQ ID NO: 3707), PLNGT (SEQ ID NO: 3708), PLDGA (SEQ ID NO: 3709), QLNGS (SEQ ID NO: 3710), PLNGN (SEQ ID NO: 3711), SLDGA (SEQ ID NO: 3712), HLNGA (SEQ ID NO: 3713), ALNGT (SEQ ID NO: 3714), PINGA (SEQ ID NO: 3715), ALDGA (SEQ ID NO: 3716), PLNCA (SEQ ID NO: 3717), PLNGQ (SEQ ID NO: 3718), PLDSA (SEQ ID NO: 3719), RLDGA (SEQ ID NO: 3720), QLNGN (SEQ ID NO: 3721), PLNGY (SEQ ID NO: 3722), PLDSS (SEQ ID NO: 3723), PLNGC (SEQ ID NO: 3724), PLYGA (SEQ ID NO: 3725), TLNGA (SEQ ID NO: 3726), PVDGA (SEQ ID NO: 3727), PLKGA (SEQ ID NO: 3728), PLNGD (SEQ ID NO: 3729), KLDGA (SEQ ID NO: 3730), PHNGA (SEQ ID NO: 3731), PLNGV (SEQ ID NO: 3732), PLNAA (SEQ ID NO: 3733), QLNGY (SEQ ID NO: 3734), PLDGS (SEQ ID NO: 3735), LLNGA (SEQ ID NO: 3736), PLNRA (SEQ ID NO: 3737), PLIGA (SEQ ID NO: 3738), PRNGA (SEQ ID NO: 3739), or ALNGS (SEQ ID NO: 3740); (ii) an [N2] wherein [N2] is or comprises: VHLY (SEQ ID NO: 3741), VHVY (SEQ ID NO: 3742), VPLY (SEQ ID NO: 3743), VNLY (SEQ ID NO: 3744), VHRY (SEQ ID NO: 3745), VHIY (SEQ ID NO: 3746), VHHY (SEQ ID NO: 3747), FHLY (SEQ ID NO: 3748), LHLY (SEQ ID NO: 3749), DHLY (SEQ ID NO: 3750), VQLY (SEQ ID NO: 3751), IHLY (SEQ ID NO: 3752), VDLY (SEQ ID NO: 3753), AHLY (SEQ ID NO: 3754), VLLY (SEQ ID NO: 3755), GHLY (SEQ ID NO: 3756), VRLY (SEQ ID NO: 3757), or VYLY (SEQ ID NO: 3758); (iii) an [N3] wherein [N3] is or comprises: AQAQ (SEQ ID NO: 3759), SQAQ (SEQ ID NO: 3760), AQPQ (SEQ ID NO: 3761), AQSQ (SEQ ID NO: 3762), AKAQ (SEQ ID NO: 3763), AHAQ (SEQ ID NO: 3764), AQAP (SEQ ID NO: 3765), DQAQ (SEQ ID NO: 3766), APAQ (SEQ ID NO: 3767), AQAK (SEQ ID NO: 3768), AQAH (SEQ ID NO: 3769), AQEQ (SEQ ID NO: 3770), ALAQ (SEQ ID NO: 3771), ARAQ SEQ ID NO: 3772), or TQAQ (SEQ ID NO: 3773); (iv) an [N4] wherein [N4] is or comprises: TGW, TGL, TGS, TGG, TAW, TGR, TAS, LSS, TSS, SSL, SSS, TLS, TVS, VSS, TSP, VSP, TMS, LSP, VAS, TAL, TTS, TLP, VLP, RGW, LSG, LAS, SSP, LLP, STS, TSA, TTP, SAL, LGS, VTP, VSA, IGW, TGF, LTP, TLA, LSA, TVG, TAP, TMP, TSL, VQS, SSM, SLP, VSQ, RSS, TST, VMS, TTA, TQP, LST, LAP, TVA, RLS, TGY, TSG, TAG, VMP, TSQ, TMA, VGS, TSW, TGV, TGT, TLG, LMP, VQP, TGM, SMS, SQL, IGS, RSV, TAA, STP, LSQ, TAQ, TGP, ASP, VSG, SAP, TLQ, LQP, TAT, TGQ, ATS, IGG, VAA, TSM, TVW, TAM, TGA, VAT, QSP, TQA, VQA, RSP, LAT, VAQ, LAA, RST, RTL, LGT, LMS, LGP, RTS, SQP, VLG, SVS, TMQ, SAV, LAG, SGP, TNS, RLT, TTQ, SAA, TSV, RLG, RAS, STQ, CSP, SAG, ALP, VTS, ISP, SVG, LTS, TTT, RSG, TQL, LNP, TVQ, IAS, LAQ, LSR, LSN, TTG, TSN, SMA, TKS, SVA, TQQ, VQQ, RLP, SAM, TAV, TQW, SSR, TQT, VNS, RSA, LMG, RQS, LVG, VTA, RTT, SMG, VMA, TKP, SAQ, NSP, ATP, VAG, RGS, VKP, RMS, NLP, NAL, RTP, RQL, VQG, VTG, VST, NAS, RVE, ATG, AMS, RNS, VMQ, SMQ, LQQ, TMG, LGQ, TSH, AAP, RSQ, TYS, ITP, VAK, TQM, TKA, SQQ, ISG, VSR, RTA, RML, SQM, VAN, CTP, ISS, AGP, TAK, RTG, LHP, TMT, AQP, QAP, RQP, LKS, NTT, TSK, RYS, KSS, NTP, VGG, IAA, LMA, MAP, VHP, VLS, LAN, ATQ, TNA, TAN, VSN, AAA, AVG, LTA, SAN, RAG, RQG, TLR, LSH, SAF, RAA, IQP, ILG, VNG, SVQ, LSK, TNG, RTQ, TMN, RGG, TTR, VRP, VKA, LAR, NQP, TMK, TYA, TQK, TTK, IAG, TQN, LAH, NTQ, RQQ, RAQ, TKQ, TQH, TNQ, LMQ, VNA, VQT, TQR, VGK, VKQ, IQS, LQR, TMM, VGN, RIG, SAK, RIA, VQN, NVQ, RIP, NAQ, NMQ, TPS, LTN, VTK, PGW, LPP, SPP, TPA, TGC, VPP, TPT, TPW, TPP, RPP, TPQ, TPR, TPG, VPA, VPQ, RPG, KGW, TRW, TAR, IPP, RSL, LVP, KGS, VAP, KGG, KAW, PGS, TRL, or AGW; and/or (v) an [N5] wherein [N5] is or comprises: VQN, VKN, VQT, VQK, DQN, VQH, GQN, VQI, VHN, FQN, LQN, VLN, VRN, VQS, VQY, AQN, VEN, VQD, VPN, IQN, VKK, DKN, VKT, VQP, EQN, GQT, FQK, GHN, or VPH; and/or wherein the AAV capsid variant comprises an amino acid modification, e.g., a conservative substitution, of any of the aforesaid amino acids in (i)-(v).

[0015] In yet another aspect, the present disclosure provides an isolated, e.g., recombinant, AAV particle comprising an AAV capsid variant and a nucleic acid comprising a transgene encoding a SOD1 targeting polynucleotide (e.g., a SOD1 targeting RNA agent), wherein the AAV capsid variant comprises one, two, three, four, or all of: (i) an [N1], wherein [N1] is or comprises: SLNGA (SEQ ID NO: 3702), QLNGA (SEQ ID NO: 3703), ALNGA (SEQ ID NO: 3704), PLNGS (SEQ ID NO: 3705), PVNGA (SEQ ID NO: 3706), PLNGA (SEQ ID NO: 3679), PLNGG (SEQ ID NO: 3707), PLNGT (SEQ ID NO: 3708), PLDGA (SEQ ID NO: 3709), QLNGS (SEQ ID NO: 3710), PLNGN (SEQ ID NO: 3711), SLDGA (SEQ ID NO: 3712), HLNGA (SEQ ID NO: 3713), ALNGT (SEQ ID NO: 3714), PINGA (SEQ ID NO: 3715), ALDGA (SEQ ID NO: 3716), PLNCA (SEQ ID NO: 3717), PLNGQ (SEQ ID NO: 3718), PLDSA (SEQ ID NO: 3719), RLDGA (SEQ ID NO: 3720), QLNGN (SEQ ID NO: 3721), PLNGY (SEQ ID NO: 3722), or PLDSS (SEQ ID NO: 3723); (ii) an [N2] wherein [N2] is or comprises: VHLY (SEQ ID NO: 3741) or VHVY (SEQ ID NO: 3742); (iii) an [N3] wherein [N3] is or comprises: AQAQ (SEQ ID NO: 3759), SQAQ (SEQ ID NO: 3760), AQPQ (SEQ ID NO: 3761), or AQSQ (SEQ ID NO: 3762); (iv) an [N4] wherein [N4] is or comprises: TGW, TGL, TGS, TGG, TAW, TGR, TAS, LSS, TSS, SSL, SSS, TLS, TVS, VSS, TSP, VSP, TMS, LSP, VAS, TAL, TTS, TLP, VLP, RGW, LSG, LAS, SSP, LLP, STS, TSA, TTP, SAL, LGS, VTP, VSA, IGW, TGF, LTP, TLA, LSA, TVG, TAP, TMP, TSL, VQS, SSM, SLP, VSQ, RSS, TST, VMS, TTA, TQP, LST, LAP, TVA, RLS, TGY, TSG, TAG, VMP, TSQ, TMA, VGS, TSW, TGV, TGT, TLG, LMP, VQP, TGM, SMS, SQL, IGS, RSV, TAA, STP, LSQ, TAQ, TGP, ASP, VSG, SAP, TLQ, LQP, TAT, TGQ, ATS, IGG, VAA, TSM, TVW, TAM, TGA, VAT, QSP, TQA, VQA, RSP, LAT, VAQ, LAA, RST, RTL, LGT, LMS, LGP, RTS, SQP, VLG, SVS, TMQ, SAV, LAG, SGP, TNS, RLT, TTQ, SAA, TSV, RLG, RAS, STQ, CSP, SAG, ALP, VTS, ISP, SVG, LTS, TTT, RSG, TQL, LNP, TVQ, IAS, LAQ, LSR, LSN, TTG, TSN, SMA, TKS, SVA, TQQ, VQQ, RLP, SAM, TAV, TQW, SSR, TQT, VNS, RSA, LMG, RQS, LVG, VTA, RTT, SMG, VMA, TKP, SAQ, NSP, ATP, VAG, RGS, VKP, RMS, NLP, NAL, RTP, RQL, VQG, VTG, VST, NAS, RVE, ATG, AMS, RNS, VMQ, SMQ, LQQ, TMG, LGQ, TSH, AAP, RSQ, TYS, ITP, VAK, TQM, TKA, SQQ, ISG, VSR, RTA, RML, SQM, VAN, CTP, ISS, AGP, TAK, RTG, LHP, TMT, AQP, QAP, RQP, LKS, NTT, TSK, RYS, KSS, NTP, VGG, IAA, LMA, MAP, VHP, VLS, LAN, ATQ, TNA, TAN, VSN, AAA, AVG, LTA, SAN, RAG, RQG, TLR, LSH, SAF, RAA, IQP, ILG, VNG, SVQ, LSK, TNG, RTQ, TMN, RGG, TTR, VRP, VKA, LAR, NQP, TMK, TYA, TQK, TTK, IAG, TQN, LAH, NTQ, RQQ, RAQ, TKQ, TQH, TNQ, LMQ, VNA, VQT, TQR, VGK, VKQ, IQS, LQR, TMM, VGN, RIG, SAK, RIA, VQN, NVQ, RIP, NAQ, NMQ, TPS, LTN, VTK, PGW, LPP, SPP, TPA, or TGC; and/or (v) an [N5] wherein [N5] is or comprises: VQN, VKN, VQT, VQK, DQN, VQH, GQN, VQI, VHN, FQN, LQN, VLN, VRN, VQS, VQY, AQN, VEN, VQD; and/or wherein the AAV capsid variant comprises an amino acid modification, e.g., a conservative substitution, of any of the aforesaid amino acids in (i)-(v).

[0016] In yet another aspect, the present disclosure provides an isolated, e.g., recombinant, AAV particle comprising an AAV capsid variant and a nucleic acid comprising a transgene encoding a SOD1 targeting polynucleotide (e.g., a SOD1 targeting RNA agent), wherein the AAV capsid variant comprises [A][B], wherein [A] comprises the amino acid sequence of PLNGA (SEQ ID NO: 3679), and [B] comprises X1, X2, X3, X4, wherein: (i) X1 is: V, I, L, A, F, D, or G; (ii) X2 is: H, N, Q, P, D, L, R, or Y; (iii) X3 is: L, H, I, R, or V; and (iv) X4 is Y; and/or wherein the AAV capsid variant comprises an amino acid modification, e.g., a conservative substitution, of any of the aforesaid amino acids in (i)-(iv); optionally wherein the AAV capsid variant further comprises one, two, or all of an amino acid other than T at position 593 (e.g., a V, S, L, R, I, A, N, C, Q, M, P, or K), an amino acid other than G at position 594 (e.g., T, M, A, K, S, Q, V, I, R, N, P, L, H, or Y), and/or an amino acid other than W at position 595 (e.g., K, Q, S, P, C, A, G, N, T, R, V, M, H, L, E, F, or Y), relative to a reference sequence numbered according to the amino acid sequence of SEQ ID NO: 138.

[0017] In yet another aspect, the present disclosure provides an isolated, e.g., recombinant, AAV particle comprising an AAV capsid variant and a nucleic acid comprising a transgene encoding a SOD1 targeting polynucleotide (e.g., a SOD1 targeting RNA agent), wherein the AAV capsid variant comprises PLNGAVHLY (SEQ ID NO: 3648) and optionally wherein the AAV capsid variant further comprises one, two, or all of an amino acid other than T at position 593 (e.g., A, L, R, V, C, I, K, M, N, P, Q, S), an amino acid other than G at position 594 (e.g., M, S, A, Q, V, T, L, P, H, K, N, I, Y, or R), and/or an amino acid other than W at position 595 (e.g., S, P, T, A, G, L, Q, H, N, R, K, V, E, F, M, C, or Y), relative to a reference sequence numbered according to the amino acid sequence of SEQ ID NO: 138.

[0018] In yet another aspect, the present disclosure provides an isolated, e.g., recombinant, AAV particle comprising an AAV capsid variant and a nucleic acid comprising a transgene encoding a SOD1 targeting polynucleotide (e.g., a SOD1 targeting RNA agent), wherein the AAV capsid variant comprises an amino sequence comprising the amino acid sequence of PLNGAVHLY (SEQ ID NO: 3648); and which further comprises one, two, three, or all of: (i) the amino acid at position 593, relative to a reference sequence numbered according to the amino acid sequence of SEQ ID NO: 138, is: T, A, L, R, V, C, I, K, M, N, P, Q, or S; (ii) the amino acid at position 594, relative to a reference sequence numbered according to the amino acid sequence of SEQ ID NO: 138, is: G, M, S, A, Q, V, T, L, P, H, K, N, I, Y, or R; and/or (iii) the amino acid at position 595, relative to a reference sequence numbered according to the amino acid sequence of SEQ ID NO: 138, is: W, S, P, T, A, G, L, Q, H, N, R, K, V, E, F, M, C, or Y; optionally, provided that the amino acids at positions 593-595, relative to a reference sequence numbered according to the amino acid sequence of SEQ ID NO: 138, does not comprise the amino acid sequence of TGW.

[0019] In yet another aspect, the present disclosure provides an isolated, e.g., recombinant, AAV particle comprising an AAV capsid variant and a nucleic acid comprising a transgene encoding a SOD1 targeting polynucleotide (e.g., a SOD1 targeting RNA agent), wherein the AAV capsid variant comprises X1-X2-X3-X4-X5-X6-X7-X8-X9-X10-X11-X12-X13-X14-X15-X16-X17-X18-X19, wherein: (i) X1 is: P, A, D, E, F, G, H, K, L, N, Q, R, S, T, or V; (ii) X2 is independently chosen from: L, D, E, F, H, I, M, N, P, Q, R, S, or V; (iii) X3 is: N, A, D, E, G, H, I, K, Q, S, T, V, or Y; (iv) X4 is: G, A, C, D, E, P, Q, R, S, T, V, or W; (v) X5 is: A, C, D, E, F, G, H, I, K, N, P, Q, R, S, T, V, W, or Y; (vi) X6 is: V, A, C, D, E, F, G, H, I, K, L, M, N, Q, R, S, T, or Y; (vii) X7 is: H, A, D, E, G, I, K, L, M, N, P, Q, R, S, T, V, or Y; (viii) X8 is independently chosen from: L, A, D, E, F, G, H, I, K, M, N, P, Q, R, S, T, V, or Y; (ix) X9 is independently chosen from: Y, A, C, D, E, F, G, H, I, K, L, M, N, Q, R, S, T, V, or W; (x) X10 is independently chosen from: A, C, D, E, F, G, H, I, K, L, N, P, Q, R, S, T, V, or; Y; (xi) X11 is independently chosen from: Q, A, D, E, H, K, L, P, R, or T; (xii) X12 is: A, D, E, G, H, L, N, P, Q, R, S, T, or V; (xiii) X13 is: Q, E, H, K, L, P, R, or T; (xiv) X14 is: T, A, C, D, E, F, G, H, I, K, L, M, N, P, Q, R, S, V, W, or Y; (xv) X15 is: G, A, C, D, E, F, H, I, K, L, M, N, P, Q, R, S, T, V, W, or Y; (xvi) X16 is: W, A, C, D, E, F, G, H, I, K, L, M, N, P, Q, R, S, T, V, or Y; (xvii) X17 is: V, A, D, E, F, G, H, I, or L; (xviii) X18 is: Q, E, H, K, L, P, or R; and/or (xix) X19 is: N, D, H, I, K, P, S, T, or Y.

[0020] In yet another aspect, the present disclosure provides an isolated, e.g., recombinant, AAV particle comprising an AAV capsid variant and a nucleic acid comprising a transgene encoding a SOD1 targeting polynucleotide (e.g., a SOD1 targeting RNA agent), wherein the AAV capsid variant comprises: (a) the amino acid sequence of any one of SEQ ID NOs: 139-1138; (b) an amino acid sequence comprising at least 3, 4, 5, 6, 7, 8, 9, 10, 11, 12, 13, 14, 15, 16, 17, or 18 consecutive amino acids from any one of SEQ ID NOs: 139-1138; or (c) an amino acid sequence comprising at least one, two, or three but no more than four different amino acids, relative to the amino acid sequence of any one of SEQ ID NOs: 139-1138; (d) an amino sequence comprising at least one, two, or three but no more than four modifications, e.g., substitutions (e.g., conservative substitutions), insertions, or deletions, relative to the amino acid sequence of any one of SEQ ID NOs: 139-1138; optionally wherein the AAV capsid variant does not comprise the amino acid sequence of TGW at positions 593-595, relative to a reference sequence numbered according to the amino acid sequence of SEQ ID NO: 138.

[0021] In yet another aspect, the present disclosure provides an isolated, e.g., recombinant, AAV particle comprising an AAV capsid variant and a nucleic acid comprising a transgene encoding a SOD1 targeting polynucleotide (e.g., a SOD1 targeting RNA agent), wherein the AAV capsid variant comprises: (a) the amino acid sequence of any one of SEQ ID NOs: 139-476; (b) an amino acid sequence comprising at least 3, 4, 5, 6, 7, 8, 9, 10, 11, 12, 13, 14, 15, 16, 17, or 18 consecutive amino acids from any one of SEQ ID NOs: 139-476; or (c) an amino acid sequence comprising at least one, two, or three but no more than four different amino acids, relative to the amino acid sequence of any one of SEQ ID NOs: 139-476; (d) an amino sequence comprising at least one, two, or three but no more than four modifications, e.g., substitutions (e.g., conservative substitutions), insertions, or deletions, relative to the amino acid sequence of any one of SEQ ID NOs: 139-476; optionally wherein the AAV capsid variant does not comprise the amino acid sequence of TGW at positions 593-595, relative to a reference sequence numbered according to the amino acid sequence of SEQ ID NO: 138.

[0022] In yet another aspect, the present disclosure provides an isolated, e.g., recombinant, AAV particle comprising an AAV capsid variant and a nucleic acid comprising a transgene encoding a SOD1 targeting polynucleotide (e.g., a SOD1 targeting RNA agent), or a fragment thereof, wherein the AAV capsid variant comprises: (a) the amino acid sequence of any one of SEQ ID NOs: 140, 142-144, 148-150, 154-158, 160, 161, 163, 165, 166, 168, 170, 171, 173-175, 177-179, 181, 182, 184-197, 199-214, 218-222, 224, 225, 227-241, 243-253, 255-262, 265, 267, 268, 270, 271, 273, 274, 276, 277, 279, 282, 284-286, 288-296, 300-310, 312, 315, 317, 318, 320-323, 326, 327, 331, 332, 334, 336, 337, 339, 340, 341, 343, 344, 346, 349, 351, 352, 356-363, 365-367, 369, 370, 372-376, 378-381, 383-389, 392, 393, 395, 397-400, 404, 407, 408, 411, 412, 415, 417, 420-430, 432, 433, 435-438, 441, 442, 446-448, 451-453, 456, 458, 460, 461, 465, 467-469, 471-473, 475, 476, 478, 480, 482, 485, 488, 490, 492, 493, 495, 498, 500-503, 505, 507, 509, 510, 517, 522-526, 528, 535-538, 540, 543-545, 547, 551, 552, 557, 559, 561, 564, 568, 570, 572-574, 577, 585-588, 592-594, 596, 601, 602, 605, 612, 616, 619, 622, 624, 627, 628, 635, 640, 641, 646, 658, 660, 665, 666, 675, 678, 680, 683, 684, 689, 693, 695, 707, 711, 718, 719, 724, 727, 735, 740, 748, 751, 755, 758, 759, 765, 766, 768, 778, 783, 787, 791, 797, 801, 804, 817, 821, 832, 841, 852, 856, 861, 862, 864, 894, 906, 911, 913, 924, 929, 945, 959, 961, 970, 975, 980, 983, 988, 992, 1009, 1015, 1019, 1027, 1032, 1036, 1038, 1047, 1051, 1061, 1077, 1081, 1095, or 1113; (b) an amino acid sequence comprising at least 3, 4, 5, 6, 7, 8, 9, 10, 11, 12, 13, 14, 15, 16, 17, or 18 consecutive amino acids from any one of the amino acid sequences in (i); or (c) an amino acid sequence comprising at least one, two, or three but no more than four different amino acids, relative to the amino acid sequence of any one of the amino acid sequences in (i); (d) an amino sequence comprising at least one, two, or three but no more than four modifications, e.g., substitutions (e.g., conservative substitutions), insertions, or deletions, relative to the amino acid sequence of any one of the amino acid sequences in (i); optionally wherein the AAV capsid variant does not comprise the amino acid sequence of TGW at positions 593-595, relative to a reference sequence numbered according to the amino acid sequence of SEQ ID NO: 138.

[0023] In accordance with some aspects of the present disclosure the SOD1 targeting polynucleotide, e.g., the SOD1 targeting RNA agent, is a single-stranded antisense RNA molecule, a single-stranded siRNA, or a double-stranded RNA (e.g., a siRNA duplex) that inhibits expression of SOD1. For example, the SOD1 targeting polynucleotide may be a siRNA duplex comprising: (i) a sense strand sequence comprising at least 15 (e.g., at least 16, 17, 18, 19, 20, 21, 22, or 23) contiguous nucleotides differing by no more than 3 (e.g., by no more than 0, 1 or 2) nucleotides from a sense sequence listed in Table 10; and (ii) an antisense strand sequence comprising at least 15 (e.g., at least 16, 17, 18, 19, 20, 21, 22, or 23) contiguous nucleotides differing by no more than 3 (e.g., by no more than 0, 1 or 2) nucleotides from an antisense sequence in Table 10.

[0024] In yet another aspect, the present disclosure provides a cell, e.g., a host cell, comprising the AAV particles described herein. The method of making the AAV particle may comprise: (i) providing a host cell comprising a viral genome; and (ii) incubating the host cell under conditions suitable to enclose the viral genome in an AAV capsid variant, e.g., an AAV capsid variant described herein; thereby making the AAV particle.

[0025] Further disclosed are pharmaceutical compositions including the AAV particles as described herein, and a pharmaceutically acceptable excipient. The administration of the pharmaceutical compositions may be used in the methods of treating a subject having or diagnosed with having a neurological disorder, e.g., a neurodegenerative disorder. In some embodiments the neurological disorder, neurodegenerative disorder, or disease associated with SOD1 expression is amyotrophic lateral sclerosis (ALS). In some embodiments, the AAV particles are administered intravenously or by ICM, or a combination thereof.

[0026] In some aspects, ALS is familial ALS linked to SOD1 mutations. In other aspects, ALS is sporadic ALS which is characterized by abnormal aggregation of SOD1 protein or disruption of SOD1 protein function or localization, though not necessarily as a result of genetic mutation. The symptoms of ALS ameliorated by the present method may include motor neuron degeneration, muscle weakness, stiffness of muscles, slurred speech and/or difficulty in breathing. The ALS may be early stage ALS, middle stage ALS; and/or late stage ALS

[0027] In some embodiments, the pharmaceutical composition of the present disclosure is used as a solo therapy. In other embodiments, the pharmaceutical composition of the present disclosure is used in combination therapy. The combination therapy may be in combination with one or more neuroprotective agents such as small molecule compounds, growth factors and hormones which have been tested for their neuroprotective effect on motor neuron degeneration.

### Enumerated Embodiments

[0028] 1. An isolated, e.g., recombinant, AAV particle comprising an AAV capsid variant and a nucleic acid comprising a transgene encoding SOD1 targeting polynucleotide (e.g., a SOD1 targeting RNA agent, e.g., a siRNA duplex), wherein the AAV capsid variant:
   [0029] (i) is enriched at least about 5, 6, 7, 8, 9, 10, 20, 30, 40, 50, 100, 200, 300, or 400-fold, in the brain, e.g., the brain of a non-human primate (NHP) compared to a reference sequence of SEQ ID NO: 138 (e.g., as provided in Table 20), e.g., when measured by an assay as described in Example 2;
   [0030] (ii) transduces a brain region, e.g., a brain region of an NHP, e.g., selected from dentate nucleus, cerebellar cortex, cerebral cortex, brain stem, hippocampus, thalamus and putamen, wherein the level of transduction is at least 5, 10, 50, 100, 200, 500, 1,000, 2,000, 5,000, or 10,000-fold greater as compared to a reference sequence of SEQ ID NO: 138, e.g., when measured by an assay, e.g., an immunohistochemistry assay, a qRT-PCR, or a RT-ddPCR assay, e.g., as described in Example 3;
   [0031] (iii) delivers an increased level of a payload to a brain region, e.g., a brain region of an NHP, optionally wherein the level of the payload is increased by at least 500, 1,000, 2,000, 5,000, or 10,000-fold, as compared to a reference sequence of SEQ ID NO: 138, e.g., when measured by an assay, e.g., a qRT-PCR or a RT-ddPCR assay (e.g., as described in Example 3), optionally wherein the brain region comprises a frontal cortex, sensory cortex, motor cortex, putamen, thalamus, cerebellar cortex, dentate nucleus, caudate, and/or hippocampus;
   [0032] (iv) delivers an increased level of a payload to a spinal cord region, e.g., a spinal cord region of an NHP, optionally wherein the level of the payload is increased by at least 10, 20, 50, 100, 200, 300, 400, 500, 600, 700, 800 or 900-fold, as compared to a reference sequence of SEQ ID NO: 138, e.g., when measured by an assay, e.g., a qRT-PCR assay (e.g., as described in Example 3), optionally wherein the spinal cord region comprises a cervical, thoracic, and/or lumbar region; and/or
   [0033] (v) delivers an increased level of viral genomes to a brain region, e.g., a brain region of an NHP, optionally wherein the level of viral genomes is increased by at least 5, 10, 20, 30, 40 or 50-fold, as compared to a reference sequence of SEQ ID NO: 138, e.g., when measured by an assay, e.g., a qRT-PCR or a RT-ddPCR assay (e.g., as described in Example 3), optionally wherein the brain region comprises a frontal cortex, sensory cortex, motor cortex, putamen, thalamus, cerebellar cortex, dentate nucleus, caudate, and/or hippocampus.
[0034] 2. An isolated, e.g., recombinant, AAV particle comprising an AAV capsid variant and a nucleic acid comprising a transgene encoding a SOD1 targeting polynucleotide (e.g., a SOD1 targeting RNA agent, e.g., a siRNA duplex), wherein the AAV capsid variant comprises:
   [0035] (a) the amino acid sequence of any of SEQ ID NO: 3648-3659 or a sequence provided in Table 20;
   [0036] (b) an amino acid sequence comprising at least 5, 6, 7, 8, or 9 consecutive amino acids from the amino acid sequence of any of SEQ ID NO: 3648-3659 or a sequence provided in Table 20;
   [0037] (c) an amino acid sequence comprising at least one, two, or three but no more than four modifications, e.g., substitutions, (e.g., conservative substitutions), insertions, or deletions, relative to the amino acid sequence of any of 3648-3659 or a sequence provided in Table 20; or
   [0038] (d) an amino acid sequence comprising at least one, two, or three but no more than four different amino acids relative to the amino acid sequence of any of 3648-3659 or a sequence provided in Table 20;
   [0039] optionally wherein the capsid variant comprises the amino acid sequence of SEQ ID NO: 138, or an amino acid sequence with at least 95% sequence identity thereto.
[0040] 3. The isolated AAV particle of any one of embodiments 1 or 2, wherein the AAV capsid variant comprises:
   [0041] (a) the amino acid sequence of PLNGAVHLY (SEQ ID NO: 3648), or at least 5, 6, 7, or 8 consecutive amino acids from the amino acid sequence of PLNGAVHLY (SEQ ID NO: 3648);
   [0042] (b) the amino acid sequence of IVMNSLK (SEQ ID NO: 3651), or at least 4, 5, or 6 consecutive amino acids from the amino acid sequence of IVMNSLK (SEQ ID NO: 3651); or
   [0043] (c) the amino acid sequence of YSTDVRM (SEQ ID NO: 3650), YSTDERM (SEQ ID NO: 3657), or YSTDERK (SEQ ID NO: 3658), or at least 4, 5, or 6 consecutive amino acids from the amino acid sequence of YSTDVRM (SEQ ID NO: 3650), YSTDERM (SEQ ID NO: 3657), or YSTDERK (SEQ ID NO: 3658).
[0044] 4. The isolated AAV particle of embodiment 2 or 3, wherein:
   [0045] (i) the 5 consecutive amino acids comprise PLNGA (SEQ ID NO: 3679);
   [0046] (ii) the 6 consecutive amino acids comprise PLNGAV (SEQ ID NO: 3680);
   [0047] (iii) the 7 consecutive amino acids comprise PLNGAVH (SEQ ID NO: 3681);
   [0048] (iv) the 8 consecutive amino acids comprise PLNGAVHL (SEQ ID NO: 3682); and/or
   [0049] (v) the 9 consecutive amino acids comprise PLNGAVHLY (SEQ ID NO: 3648);
   [0050] optionally wherein the amino acid sequence of (i), (ii), (iii), (iv), or (v) is present immediately subsequent to position 586, relative to a reference sequence numbered according to the amino acid sequence of SEQ ID NO: 138.
[0051] 5. The isolated AAV particle of any one of embodiments 2-4, wherein:
   [0052] (i) the 5 consecutive amino acids comprise IVMNS (SEQ ID NO: 3694);
   [0053] (ii) the 6 consecutive amino acids comprise IVMNSL (SEQ ID NO: 3695); and/or
   [0054] (iii) the 7 consecutive amino acids comprise IVMNSLK (SEQ ID NO: 3651),
   [0055] optionally wherein the amino acid sequence of (i), (ii), or (iii) is present immediately subsequent to position 588, relative to a reference sequence numbered according to the amino acid sequence of SEQ ID NO: 138.
[0056] 6. The isolated AAV particle of any one of embodiments 1-5, wherein the AAV capsid variant comprises:
   [0057] (i) the amino acid sequence of PLNGAVHLY (SEQ ID NO: 3648), wherein the amino acid sequence of PLNGAVHLY (SEQ ID NO: 3648) is present immediately subsequent to position 586, relative to a reference sequence numbered according to the amino acid sequence of SEQ ID NO: 138;
   [0058] (ii) the amino acid sequence of GGTLAVVSL (SEQ ID NO: 3654), wherein the amino acid sequence of GGTLAVVSL (SEQ ID NO: 3654) is present immediately subsequent to position 586, relative to a reference sequence numbered according to the amino acid sequence of SEQ ID NO: 138;
   [0059] (iii) the amino acid sequence of IVMNSLK (SEQ ID NO: 3651), wherein the amino acid sequence of IVMNSLK (SEQ ID NO: 3651) is present immediately subsequent to position 588, relative to a reference sequence numbered according to the amino acid sequence of SEQ ID NO: 138; or
   [0060] (iv) the amino acid sequence of any of SEQ ID NOs: 3649, 3650, 3652, 3653, or 3655-3659, wherein the amino acid sequence of any of the aforesaid sequences is present immediately subsequent to position 589, relative to a reference sequence numbered according to the amino acid sequence of SEQ ID NO: 138.
[0061] 7. The isolated AAV particle of any one of embodiments 1-6, wherein:
   [0062] (i) the AAV capsid variant comprises an amino acid sequence encoded by the nucleotide sequence of any one of SEQ ID NOs: 3660-3671, or a nucleotide sequence having at least 80%, 85%, 90%, 92%, 95%, 96%, 97%, 98%, or 99% sequence identity thereto;
   [0063] (ii) the AAV capsid variant comprises an amino acid sequence encoded by a nucleotide sequence comprising at least one, two, three, four, five, six, or seven modifications, e.g., substitutions (e.g., conservative substitutions), but no more than ten modifications of the nucleotide sequences of any of SEQ ID NOs: 3660-3671;
   [0064] (iii) the AAV capsid variant comprises an amino acid sequence encoded by a nucleotide sequence comprising at least one, two, three, four, five, six, or seven but no more than ten different nucleotides relative to the nucleotide sequences of any of SEQ ID NOs: 3660-3671;
   [0065] (iv) the nucleotide sequence encoding the AAV capsid variant comprises the nucleotide sequence of any one of SEQ ID NOs: 3660-3671, or a nucleotide sequence having at least 80%, 85%, 90%, 92%, 95%, 96%, 97%, 98%, or 99% sequence identity thereto; and/or
   [0066] (v) the nucleotide sequence encoding the AAV capsid variant comprises a nucleotide sequence comprising at least one, two, three, four, five, six, or seven modifications, e.g., substitutions (e.g., conservative substitutions), but no more than ten modifications of the nucleotide sequence of any of SEQ ID NOs: 3660-3671.
[0067] 8. The isolated AAV particle of any one of embodiments 1-5, wherein the AAV capsid variant comprises:
   [0068] (i) the AAV capsid variant comprises the amino acid sequence of any one of SEQ ID NOs: 3636-3647, or an amino acid sequence with at least 90% (e.g., at least 95, 96, 97, 98, or 99%) sequence identity thereto; or
   [0069] (ii) the nucleotide sequence encoding the AAV capsid variant comprises the nucleotide sequence of any one of SEQ ID NOs: 3623-3635, or a nucleotide sequence with at least 90% (e.g., at least 95, 96, 97, 98, or 99%) sequence identity thereto.
[0070] 9. An isolated, e.g., recombinant, AAV particle comprising an AAV capsid variant and a nucleic acid comprising a transgene encoding a SOD1 targeting polynucleotide (e.g., a SOD1 targeting RNAi), wherein the AAV capsid variant comprises:
   [0071] (i) the amino acid sequence of PLNGAVHLY (SEQ ID NO: 3648);
   [0072] (ii) an amino acid sequence comprising at least 5, 6, 7, 8, or 9 consecutive amino acids from the amino acid sequence of PLNGAVHLY (SEQ ID NO: 3648);
   [0073] (iii) an amino acid sequence comprising at least one, two, or three but no more than four modifications, e.g., substitutions (e.g., conservative substitutions), insertions, or deletions, relative to the amino acid sequence of PLNGAVHLY (SEQ ID NO: 3648); or
   [0074] (iv) an amino acid sequence comprising at least one, two, or three but no more than four different amino acids relative to the amino acid sequence of PLNGAVHLY (SEQ ID NO: 3648);
   [0075] optionally wherein the capsid variant comprises the amino acid sequence of SEQ ID NO: 138, or an amino acid sequence with at least 95% sequence identity thereto.
[0076] 10. The isolated AAV particle of embodiment 9, wherein the amino acid sequence of (i), (ii), or (iii) is present in loop VIII, relative to a reference sequence of SEQ ID NO: 138.
[0077] 11. The isolated AAV particle of any one of embodiments 9 or 10, wherein the amino acid sequence is present immediately subsequent to position 586, relative to a reference sequence numbered according to the amino acid sequence of SEQ ID NO: 138.
[0078] 12. The isolated AAV particle of any one of embodiments 1-11, wherein the AAV capsid variant:
   [0079] (i) is enriched at least about 300 or 400-fold compared, in the brain compared to a reference sequence of SEQ ID NO: 138, e.g., when measured by an assay as described in f;
   [0080] (ii) transduces a brain region, e.g., selected from dentate nucleus, cerebellar cortex, cerebral cortex, brain stem, hippocampus, thalamus and putamen, wherein the level of transduction is at least 500, 1,000, 2,000, 5,000, or 10,000-fold greater as compared to a reference sequence of SEQ ID NO: 138, e.g., when measured by an assay, e.g., an immunohistochemistry assay, a qRT-PCR, or a RT-ddPCR assay, e.g., as described in Example 3;
   [0081] (iii) delivers an increased level of a payload to a brain region, optionally wherein the level of the payload is increased by at least 500, 1,000, 2,000, 5,000, or 10,000-fold, as compared to a reference sequence of SEQ ID NO: 138, e.g., when measured by an assay, e.g., a qRT-PCR or a RT-ddPCR assay (e.g., as described in Example 3), optionally wherein the brain region comprises a frontal cortex, sensory cortex, motor cortex, putamen, thalamus, cerebellar cortex, dentate nucleus, caudate, and/or hippocampus;
   [0082] (iv) delivers an increased level of a payload to a spinal cord region, optionally wherein the level of the payload is increased by at least 50, 100, 200, 300, 400, 500, 600, 700, 800 or 900-fold, as compared to a reference sequence of SEQ ID NO: 138, e.g., when measured by an assay, e.g., a qRT-PCR assay (e.g., as described in Example 3), optionally wherein the spinal cord region comprises a cervical, thoracic, and/or lumbar region; and/or
   [0083] (v) delivers an increased level of viral genomes to a brain region, optionally wherein the level of viral genomes is increased by at least 5, 10, 20, 30, 40 or 50-fold, as compared to a reference sequence of SEQ ID NO: 138, e.g., when measured by an assay, e.g., a qRT-PCR or a RT-ddPCR assay (e.g., as described in Example 3), optionally wherein the brain region comprises a frontal cortex, sensory cortex, motor cortex, putamen, thalamus, cerebellar cortex, dentate nucleus, caudate, and/or hippocampus.
[0084] 13. The isolated AAV particle of any one of embodiments 1-8 or 10, wherein:
   [0085] (i) the AAV capsid variant has an increased tropism for a muscle cell or tissue, e.g., a heart tissue, relative to the tropism of a reference sequence comprising the amino acid sequence of SEQ ID NO: 138; and/or
   [0086] (ii) the AAV capsid variant delivers an increased level of a payload to a muscle region, optionally wherein the level of the payload is increased by at least 10, 15, 20, 30, or 40-fold, as compared to a reference sequence of SEQ ID NO: 138, e.g., when measured by an assay, e.g., an IHC assay or a RT-ddPCR assay (e.g., as described in Example 3), optionally wherein the muscle region comprises a heart muscle (e.g., a heart atrium muscle region or a heart ventricle muscle region), quadriceps muscle, and/or a diaphragm muscle region.
[0087] 14. The isolated AAV particle of any one of embodiments 1-13, wherein the AAV capsid variant comprises:
   [0088] (i) a VP1 protein, a VP2 protein, a VP3 protein, or a combination thereof;
   [0089] (ii) the amino acid sequence corresponding to positions 138-743, e.g., a VP2, of any one of SEQ ID NOs: 3636-3647, or a sequence with at least 90% (e.g., at least about 95, 96, 97, 98, or 99%) sequence identity thereto;
   [0090] (iii) the amino acid sequence corresponding to positions 203-743, e.g., a VP3, of any one of SEQ ID NOs: 3636-3647, or a sequence with at least 90% (e.g., at least about 95, 96, 97, 98, or 99%) sequence identity thereto;
   [0091] (iv) the amino acid sequence of any one of SEQ ID NOs: 3636-3647, or an amino acid sequence with at least 90% (e.g., at least about 95, 96, 97, 98, or 99%) sequence identity thereto;
   [0092] (v) an amino acid sequence having at least one, two or three modifications, but not more than 30, 20 or 10 modifications, e.g., substitutions (e.g., conservative substitutions), of the amino acid sequence of any one of SEQ ID NOs: 3636-3647;
   [0093] (vi) an amino acid sequence having at least one, two or three, but no more than 30, 20 or 10 different amino acids relative to the amino acid sequence of any one of SEQ ID NOs: 3636-3647; and/or
   [0094] (vii) an amino acid sequence encoded by the nucleotide sequence of any one of SEQ ID NOs: 3623-3635, or a nucleotide sequence with at least 90% (e.g., at least about 95, 96, 97, 98, or 99%) sequence identity thereto.
[0095] 15. An isolated, e.g., recombinant, AAV particle comprising an AAV capsid variant and a nucleic acid comprising a transgene encoding a SOD1 targeting polynucleotide (e.g., a SOD1 targeting RNA agent, e.g., a siRNA duplex), wherein the AAV capsid variant comprises an amino sequence comprising the following formula: [N1]-[N2], wherein:
   [0096] (i) [N1] comprises X1, X2, X3, X4, and X5, wherein:
      [0097] (a) position X1 is: P, Q, A, H, K, L, R, S, or T;
      [0098] (b) position X2 is: L, I, V, H, or R;
      [0099] (c) position X3 is: N, D, I, K, or Y;
      [0100] (d) position X4: G, A, C, R, or S; and
      [0101] (e) position X5: A, S, T, G, C, D, N, Q, V, or Y; and
   [0102] (ii) [N2] comprises the amino acid sequence of VHLY (SEQ ID NO: 3741), VHIY (SEQ ID NO: 3746), VHVY (SEQ ID NO: 3742), or VHHY(SEQ ID NO: 3747); and/or an amino acid modification, e.g., a conservative substitution, of any of the aforesaid amino acids in (i) and/or (ii);
   [0103] optionally wherein the AAV capsid variant further comprises:
   [0104] (i) one, two, or all of an amino acid other than T at position 593 (e.g., V, L, R, S, A, C, I, K, M, N, P, or Q), an amino acid other than G at position 594 (e.g., S, A, T, M, V, Q, L, H, I, K, N, P, R, or Y), and/or an amino acid other than W at position 595 (e.g., S, P, G, A, Q, L, M, K, C, E, F, H, R, T, V, or Y), relative to a reference sequence numbered according to the amino acid sequence of SEQ ID NO: 138; and/or
   [0105] (ii) one, two, or all of an amino acid other than V at position 596 (e.g., D, F, G, L, A, E, or I), an amino acid other than Q at position 597 (e.g., P, K, R, H, E, or L), and/or an amino acid other than N at position 598 (e.g., T, K, H, D, Y, S, I, or P), relative to a reference sequence numbered according to the amino acid sequence of SEQ ID NO: 138.
[0106] 16. An isolated, e.g., recombinant, AAV particle comprising an AAV capsid variant and a nucleic acid comprising a transgene encoding a SOD1 targeting polynucleotide (e.g., a SOD1 targeting RNA agent, e.g., a siRNA duplex), wherein the AAV capsid variant comprises one, two, three, four, or all of:
   [0107] (i) an [N1], wherein [N1] is or comprises: SLNGA (SEQ ID NO: 3702), QLNGA (SEQ ID NO: 3703), ALNGA (SEQ ID NO: 3704), PLNGS (SEQ ID NO: 3705), PVNGA (SEQ ID NO: 3706), PLNGA (SEQ ID NO: 3679), PLNGG (SEQ ID NO: 3707), PLNGT (SEQ ID NO: 3708), PLDGA (SEQ ID NO: 3709), QLNGS (SEQ ID NO: 3710), PLNGN (SEQ ID NO: 3711), SLDGA (SEQ ID NO: 3712), HLNGA (SEQ ID NO: 3713), ALNGT (SEQ ID NO: 3714), PINGA (SEQ ID NO: 3715), ALDGA (SEQ ID NO: 3716), PLNCA (SEQ ID NO: 3717), PLNGQ (SEQ ID NO: 3718), PLDSA (SEQ ID NO: 3719), RLDGA (SEQ ID NO: 3720), QLNGN (SEQ ID NO: 3721), PLNGY (SEQ ID NO: 3722), PLDSS (SEQ ID NO: 3723), PLNGC (SEQ ID NO: 3724), PLYGA (SEQ ID NO: 3725), TLNGA (SEQ ID NO: 3726), PVDGA (SEQ ID NO: 3727), PLKGA (SEQ ID NO: 3728), PLNGD (SEQ ID NO: 3729), KLDGA (SEQ ID NO: 3730), PHNGA (SEQ ID NO: 3731), PLNGV (SEQ ID NO: 3732), PLNAA (SEQ ID NO: 3733), QLNGY (SEQ ID NO: 3734), PLDGS (SEQ ID NO: 3735), LLNGA (SEQ ID NO: 3736), PLNRA (SEQ ID NO: 3737), PLIGA (SEQ ID NO: 3738), PRNGA (SEQ ID NO: 3739), or ALNGS (SEQ ID NO: 3740);
   [0108] (ii) an [N2] wherein [N2] is or comprises: VHLY (SEQ ID NO: 3741), VHVY (SEQ ID NO: 3742), VPLY (SEQ ID NO: 3743), VNLY (SEQ ID NO: 3744), VHRY (SEQ ID NO: 3745), VHIY (SEQ ID NO: 3746), VHHY (SEQ ID NO: 3747), FHLY (SEQ ID NO: 3748), LHLY (SEQ ID NO: 3749), DHLY (SEQ ID NO: 3750), VQLY (SEQ ID NO: 3751), IHLY(SEQ ID NO: 3752), VDLY(SEQ ID NO: 3753), AHLY (SEQ ID NO: 3754), VLLY (SEQ ID NO: 3755), GHLY (SEQ ID NO: 3756), VRLY, (SEQ ID NO: 3757) or VYLY (SEQ ID NO: 3758);
   [0109] (iii) an [N3] wherein [N3] is or comprises: AQAQ (SEQ ID NO: 3759), SQAQ (SEQ ID NO: 3760), AQPQ (SEQ ID NO: 3761), AQSQ (SEQ ID NO: 3762), AKAQ (SEQ ID NO: 3763), AHAQ (SEQ ID NO: 3764), AQAP (SEQ ID NO: 3765), DQAQ (SEQ ID NO: 3766), APAQ (SEQ ID NO: 3767), AQAK (SEQ ID NO: 3768), AQAH (SEQ ID NO: 3769), AQEQ (SEQ ID NO: 3770), ALAQ (SEQ ID NO: 3771), ARAQ SEQ ID NO: 3772), or TQAQ (SEQ ID NO: 3773);
   [0110] (iv) an [N4] wherein [N4] is or comprises: TGW, TGL, TGS, TGG, TAW, TGR, TAS, LSS, TSS, SSL, SSS, TLS, TVS, VSS, TSP, VSP, TMS, LSP, VAS, TAL, TTS, TLP, VLP, RGW, LSG, LAS, SSP, LLP, STS, TSA, TTP, SAL, LGS, VTP, VSA, IGW, TGF, LTP, TLA, LSA, TVG, TAP, TMP, TSL, VQS, SSM, SLP, VSQ, RSS, TST, VMS, TTA, TQP, LST, LAP, TVA, RLS, TGY, TSG, TAG, VMP, TSQ, TMA, VGS, TSW, TGV, TGT, TLG, LMP, VQP, TGM, SMS, SQL, IGS, RSV, TAA, STP, LSQ, TAQ, TGP, ASP, VSG, SAP, TLQ, LQP, TAT, TGQ, ATS, IGG, VAA, TSM, TVW, TAM, TGA, VAT, QSP, TQA, VQA, RSP, LAT, VAQ, LAA, RST, RTL, LGT, LMS, LGP, RTS, SQP, VLG, SVS, TMQ, SAV, LAG, SGP, TNS, RLT, TTQ, SAA, TSV, RLG, RAS, STQ, CSP, SAG, ALP, VTS, ISP, SVG, LTS, TTT, RSG, TQL, LNP, TVQ, IAS, LAQ, LSR, LSN, TTG, TSN, SMA, TKS, SVA, TQQ, VQQ, RLP, SAM, TAV, TQW, SSR, TQT, VNS, RSA, LMG, RQS, LVG, VTA, RTT, SMG, VMA, TKP, SAQ, NSP, ATP, VAG, RGS, VKP, RMS, NLP, NAL, RTP, RQL, VQG, VTG, VST, NAS, RVE, ATG, AMS, RNS, VMQ, SMQ, LQQ, TMG, LGQ, TSH, AAP, RSQ, TYS, ITP, VAK, TQM, TKA, SQQ, ISG, VSR, RTA, RML, SQM, VAN, CTP, ISS, AGP, TAK, RTG, LHP, TMT, AQP, QAP, RQP, LKS, NTT, TSK, RYS, KSS, NTP, VGG, IAA, LMA, MAP, VHP, VLS, LAN, ATQ, TNA, TAN, VSN, AAA, AVG, LTA, SAN, RAG, RQG, TLR, LSH, SAF, RAA, IQP, ILG, VNG, SVQ, LSK, TNG, RTQ, TMN, RGG, TTR, VRP, VKA, LAR, NQP, TMK, TYA, TQK, TTK, IAG, TQN, LAH, NTQ, RQQ, RAQ, TKQ, TQH, TNQ, LMQ, VNA, VQT, TQR, VGK, VKQ, IQS, LQR, TMM, VGN, RIG, SAK, RIA, VQN, NVQ, RIP, NAQ, NMQ, TPS, LTN, VTK, PGW, LPP, SPP, TPA, TGC, VPP, TPT, TPW, TPP, RPP, TPQ, TPR, TPG, VPA, VPQ, RPG, KGW, TRW, TAR, IPP, RSL, LVP, KGS, VAP, KGG, KAW, PGS, TRL, or AGW; and/or
   [0111] (v) an [N5] wherein [N5] is or comprises VQN, VKN, VQT, VQK, DQN, VQH, GQN, VQI, VHN, FQN, LQN, VLN, VRN, VQS, VQY, AQN, VEN, VQD, VPN, IQN, VKK, DKN, VKT, VQP, EQN, GQT, FQK, GHN, or VPH; and/or
   [0112] wherein the AAV capsid variant comprises an amino acid modification, e.g., a conservative substitution, of any of the aforesaid amino acids in (i)-(v).
[0113] 17. The isolated AAV particle of embodiment 15, wherein:
   [0114] (a) position X1 is: P, Q, A, S, or T;
   [0115] (b) position X2 is L or I;
   [0116] (c) position X3 is N or D;
   [0117] (d) position X4 is G or S; and/or
   [0118] (e) position X5 is: A, S, G, T, or N.
[0119] 18. The isolated AAV particle of embodiment 15 or 17, wherein [N1] comprises AL, PI, PL, QL, SL, TL, LN, LD, IN, NG, DG, DS, GA, SA, SS, GG, GN, GS, or GT.
[0120] 19. The isolated AAV particle of any one of embodiments 15, 17, or 18, wherein [N1] comprises ALD, ALN, PIN, PLD, PLN, QLN, SLD, SLN, TLN, LNG, LDG, ING, LDS, NGA, DGA, DSA, DSS, NGG, NGN, NGS, NGT.
[0121] 20. The isolated AAV particle of any one of embodiments 15 or 17-19, wherein [N1] comprises ALDG (SEQ ID NO: 3774), ALNG (SEQ ID NO: 3775), PING (SEQ ID NO: 3776), PLDG (SEQ ID NO: 3777), PLDS (SEQ ID NO: 3778), PLNG (SEQ ID NO: 3678), QLNG (SEQ ID NO: 3779), SLDG (SEQ ID NO: 3780), SLNG (SEQ ID NO: 3781), or TLNG (SEQ ID NO: 3782).
[0122] 21. The isolated AAV particle of any one of embodiments 15-20, wherein [N1] is or comprises SLNGA (SEQ ID NO: 3702), QLNGA (SEQ ID NO: 3703), ALNGA (SEQ ID NO: 3704), PLNGS (SEQ ID NO: 3705), PVNGA (SEQ ID NO: 3706), PLNGA (SEQ ID NO: 3679), PLNGG (SEQ ID NO: 3707), PLNGT (SEQ ID NO: 3708), PLDGA (SEQ ID NO: 3709), QLNGS (SEQ ID NO: 3710), PLNGN (SEQ ID NO: 3711), SLDGA (SEQ ID NO: 3712), HLNGA (SEQ ID NO: 3713), ALNGT (SEQ ID NO: 3714), PINGA (SEQ ID NO: 3715), ALDGA (SEQ ID NO: 3716), PLNCA (SEQ ID NO: 3717), PLNGQ (SEQ ID NO: 3718), PLDSA (SEQ ID NO: 3719), RLDGA (SEQ ID NO: 3720), QLNGN (SEQ ID NO: 3721), PLNGY (SEQ ID NO: 3722), PLDSS (SEQ ID NO: 3723), PLNGC (SEQ ID NO: 3724), PLYGA (SEQ ID NO: 3725), TLNGA (SEQ ID NO: 3726), PVDGA (SEQ ID NO: 3727), PLKGA (SEQ ID NO: 3728), PLNGD (SEQ ID NO: 3729), KLDGA (SEQ ID NO: 3730), PHNGA (SEQ ID NO: 3731), PLNGV (SEQ ID NO: 3732), PLNAA (SEQ ID NO: 3733), QLNGY (SEQ ID NO: 3734), PLDGS (SEQ ID NO: 3735), LLNGA (SEQ ID NO: 3736), PLNRA (SEQ ID NO: 3737), PLIGA (SEQ ID NO: 3738), PRNGA (SEQ ID NO: 3739), or ALNGS (SEQ ID NO: 3740).
[0123] 22. The isolated AAV particle of embodiment 15-21, wherein [N1] is or comprises ALDGA (SEQ ID NO: 3716), ALNGA (SEQ ID NO: 3704), PINGA (SEQ ID NO: 3715), PLDGA (SEQ ID NO: 3709), PLDSA (SEQ ID NO: 3719), PLDSS (SEQ ID NO: 3723), PLNGA (SEQ ID NO: 3679), PLNGG (SEQ ID NO: 3707), PLNGN (SEQ ID NO: 3711), PLNGS (SEQ ID NO: 3705), PLNGT (SEQ ID NO: 3708), QLNGA (SEQ ID NO: 3703), SLDGA (SEQ ID NO: 3712), SLNGA (SEQ ID NO: 3702), or TLNGA (SEQ ID NO: 3726).
[0124] 23. The isolated AAV particle of embodiment 15-22, wherein [N1] is or comprises PLNGA (SEQ ID NO: 3679).
[0125] 24. The isolated AAV particle of any one of embodiments 15 or 17-18 or 20-23, wherein [N1]-[N2] comprises:

(i)
(SEQ ID NO: 3783)
LDGAVHLY,
(SEQ ID NO: 3784)
LNGAVHLY,
(SEQ ID NO: 3785)
INGAVHLY,
(SEQ ID NO: 3786)
LDSAVHLY,
(SEQ ID NO: 3787)
LDSSVHLY,
(SEQ ID NO: 3788)
LNGGVHLY,
(SEQ ID NO: 3789)
LNGNVHLY,
(SEQ ID NO: 3790)
LNGSVHLY,
(SEQ ID NO: 3791)
LNGTVHLY,
(SEQ ID NO: 3792)
LNGAVHIY,
(SEQ ID NO: 3793)
LDGAVHVY,
(SEQ ID NO: 3794)
LNGAVHHY;

[0126] (ii) an amino acid sequence comprising any portion of an amino acid sequence in (i), e.g., any 2, 3, 4, 5, 6, or 7 amino acids, e.g., consecutive amino acids, thereof;
[0127] (iii) an amino acid sequence comprising at least one, two, or three but no more than four modifications, e.g., substitutions (e.g., conservative substitutions), insertions, or deletions, relative to any of the amino acid sequences in (i); or
[0128] (iv) an amino acid sequence comprising at least one, two, or three but no more than four different amino acids, relative to any one of the amino acid sequences in (i).
[0129] 25. The isolated AAV particle of any one of embodiments 15-24, wherein [N1]-[N2] is or comprises:

(i)
(SEQ ID NO: 3795)
ALDGAVHLY,
(SEQ ID NO: 3704)
ALNGAVHLY,
(SEQ ID NO: 3796)
PINGAVHLY,
(SEQ ID NO: 3797)
PLDGAVHLY,
(SEQ ID NO: 3798)
PLDSAVHLY,
(SEQ ID NO: 3799)
PLDSSVHLY,
(SEQ ID NO: 3648)
PLNGAVHLY,
(SEQ ID NO: 3800)
PLNGGVHLY,
(SEQ ID NO: 3801)
PLNGNVHLY,
(SEQ ID NO: 3802)
PLNGSVHLY,
(SEQ ID NO: 3803)
PLNGTVHLY,
(SEQ ID NO: 3804)
QLNGAVHLY,
(SEQ ID NO: 3805)
SLDGAVHLY,
(SEQ ID NO: 3806)
SLNGAVHLY,
(SEQ ID NO: 3807)
TLNGAVHLY,
(SEQ ID NO: 3808)
PLNGAVHIY,
(SEQ ID NO: 3809)
PLDGAVHVY,
(SEQ ID NO: 3810)
PLNGAVHHY;

[0130] (ii) an amino acid sequence comprising any portion of an amino acid sequence in (i), e.g., any 2, 3, 4, 5, 6, 7, or 8 amino acids, e.g., consecutive amino acids, thereof;
[0131] (iii) an amino acid sequence comprising at least one, two, or three but no more than four modifications, e.g., substitutions (e.g., conservative substitutions), insertions, or deletions, relative to any of the amino acid sequences in (i); or
[0132] (iv) an amino acid sequence comprising at least one, two, or three but no more than four different amino acids, relative to any one of the amino acid sequences in (i).
[0133] 26. The isolated AAV particle of any one of embodiments 15-25, wherein [N1]-[N2] is or comprises PLNGAVHLY (SEQ ID NO: 3648).
[0134] 27. The isolated AAV particle of any one of embodiments 15-26, wherein the AAV capsid variant further comprises one, two, three, or all of an amino acid other than A at position 589 (e.g., D, S, or T), an amino acid other than Q at position 590 (e.g., K, H, L, P, or R), an amino acid other than A at position 591 (e.g., P, E, or R), and/or an amino acid other than Q at position 592 (e.g., H, K, or P).
[0135] 28. The isolated AAV particle of any one of embodiments 15-27, wherein the AAV capsid variant further comprises one, two, three, or all of an amino acid other than A at position 596 (e.g., D, S, or T), an amino acid other than Q at position 597 (e.g., K, H, L, P, or R), an amino acid other than A at position 598 (e.g., P, E, or R), and/or an amino acid other than Q at position 599 (e.g., H, K, or P), numbered according to the amino acid sequence of SEQ ID NO: 5, 8, or 3636.
[0136] 29. The isolated AAV particle of any one of embodiments 15-26, wherein the AAV capsid variant further comprises
   [0137] (i) A at position 589, Q at position 590, A at position 591, and/or Q at position 592, numbered according to the amino acid sequence of SEQ ID NO: 138; or
   [0138] (ii) A at position 596, Q at position 597, A at position 598, and/or Q at position 599, numbered according to the amino acid sequence of SEQ ID NO: 5, 8, or 3636.
[0139] 30. The isolated AAV particle of any one of embodiments 15 or 17-29, wherein the AAV capsid variant further comprises [N3], wherein [N3] comprises X6, X7, X8, and X9, wherein:
   [0140] (a) position X6 is: A, D, S, or T;
   [0141] (b) position X7 is: Q, K, H, L, P, or R;
   [0142] (c) position X8 is: A, P, E, or R; and
   [0143] (d) position X9 is: Q, H, K, or P; and/or
[0144] an amino acid modification, e.g., a conservative substitution, of any of the aforesaid amino acids in (a)-(d).
[0145] 31. The isolated AAV particle of embodiment 30, wherein:
   [0146] (a) position X6 is: A, D, S;
   [0147] (b) position X7 is Q or K;
   [0148] (c) position X8 is A or P; and/or
   [0149] (d) position X9 is Q.
[0150] 32. The isolated AAV particle of embodiment 30 or 31, wherein [N3] comprises AQ, SQ, AK, DQ, PQ, QA, QP, or KA.
[0151] 33. The isolated AAV particle of any one of embodiments 30-32, wherein [N3] comprises AQA, AQP, SQA, AKA, DQA, QAQ, QPQ, or KAQ.
[0152] 34. The isolated AAV particle of any one of embodiments 30-33, wherein [N3] is or comprises AQAQ (SEQ ID NO: 3759), SQAQ (SEQ ID NO: 3760), AQPQ (SEQ ID NO: 3761), AQSQ (SEQ ID NO: 3762), AKAQ (SEQ ID NO: 3763), AHAQ (SEQ ID NO: 3764), AQAP (SEQ ID NO: 3765), DQAQ (SEQ ID NO: 3766), APAQ (SEQ ID NO: 3767), AQAK (SEQ ID NO: 3768), AQAH (SEQ ID NO: 3769), AQEQ (SEQ ID NO: 3770), ALAQ (SEQ ID NO: 3771), ARAQ SEQ ID NO: 3772), or TQAQ (SEQ ID NO: 3773).
[0153] 35. The isolated AAV particle of any one of embodiments 16 or 30-34, wherein [N3] is or comprises AQAQ (SEQ ID NO: 3759), AQPQ (SEQ ID NO: 3761), SQAQ (SEQ ID NO: 3760), AKAQ (SEQ ID NO: 3763), or DQAQ (SEQ ID NO: 3766).
[0154] 36. The isolated AAV particle of any one of embodiments 16 or 30-35, wherein [N3] is or comprises AQAQ.
[0155] 37. The isolated AAV article of an one of embodiments 16 or 30-36, wherein [N2]-[N3] comprises:

(i)
(SEQ ID NO: 3811)
VHLYAQAQ,
(SEQ ID NO: 3812)
VHLYAQPQ,
(SEQ ID NO: 3813)
VHLYSQAQ,
(SEQ ID NO: 3814)
VHLYAKAQ,
(SEQ ID NO: 3815)
VHLYDQAQ,
(SEQ ID NO: 3816)
VHIYAQAQ,
(SEQ ID NO: 3817)
VHVYAQAQ,
(SEQ ID NO: 3818)
VHHYAQAQ;

[0156] (ii) an amino acid sequence comprising any portion of an amino acid sequence in (i), e.g., any 2, 3, 4, 5, 6, or 7 amino acids, e.g., consecutive amino acids, thereof;
[0157] (iii) an amino acid sequence comprising at least one, two, or three but no more than four modifications, e.g., substitutions (e.g., conservative substitutions), insertions, or deletions, relative to any of the amino acid sequences in (i); or
[0158] (iv) an amino acid sequence comprising at least one, two, or three but no more than four different amino acids, relative to any one of the amino acid sequences in (i).
[0159] 38. The isolated AAV particle of any one of embodiments 30-37, wherein [N1]-[N2]-[N3] comprises:

(i)
(SEQ ID NO: 3819)
ALDGAVHLYAQ,
(SEQ ID NO: 3820)
ALNGAVHLYAQ,
(SEQ ID NO: 3821)
PINGAVHLYAQ,
(SEQ ID NO: 3822)
PLDGAVHLYAQ,
(SEQ ID NO: 3823)
PLDGAVHLYSQ,
(SEQ ID NO: 3824)
PLDSAVHLYAQ,
(SEQ ID NO: 3825)
PLDSSVHLYAQ,
(SEQ ID NO: 3826)
PLNGAVHLYAK,
(SEQ ID NO: 3827)
PLNGAVHLYAQ,
(SEQ ID NO: 3828)
PLNGAVHLYDQ,
(SEQ ID NO: 3829)
PLNGAVHLYSQ,
(SEQ ID NO: 3830)
PLNGGVHLYAQ,
(SEQ ID NO: 3831)
PLNGNVHLYAQ,
(SEQ ID NO: 3832)
PLNGSVHLYAQ,
(SEQ ID NO: 3833)
PLNGTVHLYAQ,
(SEQ ID NO: 3834)
QLNGAVHLYAQ,
(SEQ ID NO: 3835)
SLDGAVHLYAQ,
(SEQ ID NO: 3836)
SLNGAVHLYAQ,
(SEQ ID NO: 3837)
TLNGAVHLYAQ,
(SEQ ID NO: 3838)
PLNGAVHIYAQ,
(SEQ ID NO: 3839)
PLDGAVHVYAQ,
(SEQ ID NO: 3840)
PLNGAVHHYAQ;

[0160] (ii) an amino acid sequence comprising any portion of an amino acid sequence in (i), e.g., any 2, 3, 4, 5, 6, 7, 8, 9, or 10 amino acids, e.g., consecutive amino acids, thereof;
[0161] (iii) an amino acid sequence comprising at least one, two, or three but no more than four modifications, e.g., substitutions (e.g., conservative substitutions), insertions, or deletions, relative to any of the amino acid sequences in (i); or
[0162] (iv) an amino acid sequence comprising at least one, two, or three but no more than four different amino acids, relative to any one of the amino acid sequences in (i).
[0163] 39. The isolated AAV particle of any one of embodiments 16 or 30-38, wherein [N1]-[N2]-[N3] is or comprises:

(i)
(SEQ ID NO: 3841)
ALDGAVHLYAQAQ,
(SEQ ID NO: 3842)
ALNGAVHLYAQAQ,
(SEQ ID NO: 3843)
PINGAVHLYAQAQ,
(SEQ ID NO: 3844)
PLDGAVHLYAQAQ,
(SEQ ID NO: 3845)
PLDGAVHLYAQPQ,
(SEQ ID NO: 3846)
PLDGAVHLYSQAQ,
(SEQ ID NO: 3847)
PLDSAVHLYAQAQ,
(SEQ ID NO: 3848)
PLDSSVHLYAQAQ,
(SEQ ID NO: 3849)
PLNGAVHLYAKAQ,
(SEQ ID NO: 3850)
PLNGAVHLYAQAQ,
(SEQ ID NO: 3851)
PLNGAVHLYAQPQ,
(SEQ ID NO: 3852)
PLNGAVHLYDQAQ,
(SEQ ID NO: 3853)
PLNGAVHLYSQAQ,
(SEQ ID NO: 3854)
PLNGGVHLYAQAQ,
(SEQ ID NO: 3855)
PLNGNVHLYAQAQ,
(SEQ ID NO: 3856)
PLNGSVHLYAQAQ,
(SEQ ID NO: 3857)
PLNGTVHLYAQAQ,
(SEQ ID NO: 3858)
QLNGAVHLYAQAQ,
(SEQ ID NO: 3859)
SLDGAVHLYAQAQ,
(SEQ ID NO: 3860)
SLNGAVHLYAQAQ,
(SEQ ID NO: 3861)
TLNGAVHLYAQAQ,
(SEQ ID NO: 3862)
PLNGAVHIYAQAQ,
(SEQ ID NO: 3863)
PLDGAVHVYAQAQ,
(SEQ ID NO: 3864)
PLNGAVHHYAQAQ;

[0164] (ii) an amino acid sequence comprising any portion of an amino acid sequence in (i), e.g., any 2, 3, 4, 5, 6, 7, 8, 9, 10, 11, or 12 amino acids, e.g., consecutive amino acids, thereof;
[0165] (iii) an amino acid sequence comprising at least one, two, or three but no more than four modifications, e.g., substitutions (e.g., conservative substitutions), insertions, or deletions, relative to any of the amino acid sequences in (i); or
[0166] (iv) an amino acid sequence comprising at least one, two, or three but no more than four different amino acids, relative to any one of the amino acid sequences in (i).
[0167] 40. The isolated AAV particle of any one of embodiments 16 or 30-39, wherein [N1]-[N2]-[N3] is or comprises PLNGAVHLYAQAQ (SEQ ID NO: 3850).
[0168] 41. The isolated AAV particle of any one of embodiments 15-40, wherein the AAV capsid variant further comprises one, two, or all of an amino acid other than T at position 593 (e.g., V, L, R, S, A, C, I, K, M, N, P, or Q), an amino acid other than G at position 594 (e.g., S, A, T, M, V, Q, L, H, I, K, N, P, R, or Y), and/or an amino acid other than W at position 595 (e.g., S, P, G, A, Q, L, M, K, C, E, F, H, R, T, V, or Y), relative to a reference sequence numbered according to the amino acid sequence of SEQ ID NO: 138.
[0169] 42. The isolated AAV particle of any one of embodiments 15-41, wherein the AAV capsid variant further comprises one, two, or all of an amino acid other than T at position 600 (e.g., V, L, R, S, A, C, I, K, M, N, P, or Q), an amino acid other than G at position 601 (e.g., S, A, T, M, V, Q, L, H, I, K, N, P, R, or Y), and/or an amino acid other than W at position 602 (e.g., S, P, G, A, Q, L, M, K, C, E, F, H, R, T, V, or Y), relative to a reference sequence numbered according to the amino acid sequence of SEQ ID NO: 5, 8, or 3636.
[0170] 43. The isolated AAV particle of any one of embodiments 15-42, wherein the AAV capsid variant further comprises one, two, or all of:
   [0171] (i) the amino acid V, L, R, S, A, C, I, K, M, N, P, or Q (e.g., L) at position 593 numbered according to SEQ ID NO: 138 or at position 600 numbered according to SEQ ID NO: 5, 8, or 3636);
   [0172] (ii) the amino acid S, A, T, M, V, Q, L, H, I, K, N, P, R, or Y (e.g., S) at position 594 numbered according to SEQ ID NO: 138, or at position 601 numbered according to SEQ ID NO: 5, 8, or 3636; and/or
   [0173] (iii) the amino acid S, P, G, A, Q, L, M, K, C, E, F, H, R, T, V, or Y (e.g. P) at position 595 numbered according to SEQ ID NO: 138 or at position 602 numbered according to SEQ ID NO: 5, 8, or 3636).
[0174] 44. The isolated AAV particle of any one of embodiments 15-43, wherein the AAV capsid variant further comprises:
   [0175] (i) the amino acid L at position 593 numbered according to SEQ ID NO: 138 or at position 600 numbered according to SEQ ID NO: 5, 8, or 3636;
   [0176] (ii) the amino acid S at position 594 numbered according to SEQ ID NO: 138, or at position 601 numbered according to SEQ ID NO: 5, 8, or 3636; and
   [0177] (iii) the amino acid P at position 595 numbered according to SEQ ID NO: 138 or at position 602 numbered according to SEQ ID NO: 5, 8, or 3636.
[0178] 45. The isolated A AV particle of any one of embodiments 15-41, wherein the AAV capsid variant further comprises:
   [0179] (i) T at position 593, G at position 594, and/or W at position 595, numbered according to SEQ ID NO: 138;
   [0180] (ii) T at position 600, G at position 601, and/or W at position 602, numbered according to SEQ ID NO: 5, 8, or 3636.
[0181] 46. The isolated AAV particle of any one of embodiments 16-45, wherein the AAV capsid variant further comprises [N4], wherein [N4] comprises X10, X11, and X12, wherein:
   [0182] (a) position X10 is: T, V, L, R, S, A, C, I, K, M, N, P, or Q;
   [0183] (b) position X11 is: G, S, A, T, M, V, Q, L, H, I, K, N, P, R, or Y; and
   [0184] (c) position X12 is: W, S, P, G, A, Q, L, M, K, C, E, F, H, R, T, V, or Y; and/or
   [0185] an amino acid modification, e.g., a conservative substitution, of any of the aforesaid amino acids in (a)-(c).
[0186] 47. The isolated AAV particle of embodiment 46, wherein:
   [0187] (a) position X10 is: T, V, L, A, R, C, S, I, M, N, P, Q;
   [0188] (b) position X11 is: G, A, S, T, M, Q, V; and/or
   [0189] (c) position X12 is: P, S, W, G, A, Q, T, K, N, R, L, M, H, V, C, or E.
[0190] 48. The isolated AAV particle of any one of embodiments 46 or 47, wherein [N4] comprises LS, TG, LA, LT, SA, SS, TL, TT, TS, TA, TV, VS, AA, AG, AS, AT, CS, CT, IA, IG, IL, IQ, IS, IT, LG, LH, LK, LM, LN, LQ, MA, NA, NM, NS, NT, NV, QA, RA, RG, RI, RL, RM, RN, RQ, RS, RT, RV, SG, SM, ST, SV, TK, TM, TN, TP, TQ, TR, VA, VG, VH, VK, VL, VM, VN, VQ, VR, VT, PG, LV, SP, GW, AP, GR, AL, AW, GG, GS, GP, QP, QS, AH, AN, AQ, AR, GQ, HP, KS, MG, MP, MQ, MS, NP, QQ, QR, SH, SK, SQ, SR, IP, VE, AK, AM, AV, GA, GC, GT, KA, KP, KQ, LP, MK, MN, MT, NQ, PP, QH, QK, QM, QN, QT, RW, SL, VW, GK, GN, NG, RP, SN, GL, or VP.
[0191] 49. The isolated AAV particle of any one of embodiments 16 or 46-48, wherein [N4] is or comprises TGW, TGL, TGS, TGG, TAW, TGR, TAS, LSS, TSS, SSL, SSS, TLS, TVS, VSS, TSP, VSP, TMS, LSP, VAS, TAL, TTS, TLP, VLP, RGW, LSG, LAS, SSP, LLP, STS, TSA, TTP, SAL, LGS, VTP, VSA, IGW, TGF, LTP, TLA, LSA, TVG, TAP, TMP, TSL, VQS, SSM, SLP, VSQ, RSS, TST, VMS, TTA, TQP, LST, LAP, TVA, RLS, TGY, TSG, TAG, VMP, TSQ, TMA, VGS, TSW, TGV, TGT, TLG, LMP, VQP, TGM, SMS, SQL, IGS, RSV, TAA, STP, LSQ, TAQ, TGP, ASP, VSG, SAP, TLQ, LQP, TAT, TGQ, ATS, IGG, VAA, TSM, TVW, TAM, TGA, VAT, QSP, TQA, VQA, RSP, LAT, VAQ, LAA, RST, RTL, LGT, LMS, LGP, RTS, SQP, VLG, SVS, TMQ, SAV, LAG, SGP, TNS, RLT, TTQ, SAA, TSV, RLG, RAS, STQ, CSP, SAG, ALP, VTS, ISP, SVG, LTS, TTT, RSG, TQL, LNP, TVQ, IAS, LAQ, LSR, LSN, TTG, TSN, SMA, TKS, SVA, TQQ, VQQ, RLP, SAM, TAV, TQW, SSR, TQT, VNS, RSA, LMG, RQS, LVG, VTA, RTT, SMG, VMA, TKP, SAQ, NSP, ATP, VAG, RGS, VKP, RMS, NLP, NAL, RTP, RQL, VQG, VTG, VST, NAS, RVE, ATG, AMS, RNS, VMQ, SMQ, LQQ, TMG, LGQ, TSH, AAP, RSQ, TYS, ITP, VAK, TQM, TKA, SQQ, ISG, VSR, RTA, RML, SQM, VAN, CTP, ISS, AGP, TAK, RTG, LHP, TMT, AQP, QAP, RQP, LKS, NTT, TSK, RYS, KSS, NTP, VGG, IAA, LMA, MAP, VHP, VLS, LAN, ATQ, TNA, TAN, VSN, AAA, AVG, LTA, SAN, RAG, RQG, TLR, LSH, SAF, RAA, IQP, ILG, VNG, SVQ, LSK, TNG, RTQ, TMN, RGG, TTR, VRP, VKA, LAR, NQP, TMK, TYA, TQK, TTK, IAG, TQN, LAH, NTQ, RQQ, RAQ, TKQ, TQH, TNQ, LMQ, VNA, VQT, TQR, VGK, VKQ, IQS, LQR, TMM, VGN, RIG, SAK, RIA, VQN, NVQ, RIP, NAQ, NMQ, TPS, LTN, VTK, PGW, LPP, SPP, TPA, TGC, VPP, TPT, TPW, TPP, RPP, TPQ, TPR, TPG, VPA, VPQ, RPG, KGW, TRW, TAR, IPP, RSL, LVP, KGS, VAP, KGG, KAW, PGS, TRL, or AGW.
[0192] 50. The isolated AAV particle of any one of embodiments 16 or 46-49, wherein [N4] is or comprises LSP, TGW, LAA, LTP, SAP, SSP, TGR, TLA, TTS, TSP, TAL, TAW, TGG, TGS, TVS, VSP, VSS, AAP AGP, ASP, ATP, CSP, CTP, IAA, IAG, IAS, IGG, IGS, ILG, IQP, IQS, ISG, ISP, ISS, ITP, LAG, LAH, LAN, LAP, LAQ, LAR, LAS, LAT, LGP, LGQ, LGS, LHP, LKS, LMA, LMG, LMP, LMQ, LMS, LNP, LQP, LQQ, LQR, LSH, LSK, LSQ, LSR, LST, LTA, LTN, LTS, MAP, NAQ, NAS, NMQ, NSP, NTP, NVQ, QAP, RAA, RAQ, RAS, RGG, RGS, RIA, RIG, RIP, RLG, RLS, RMS, RNS, RQP, RSA, RSG, RSP, RSQ, RSS, RST, RTA, RTG, RTL, RTS, RTT, RVE, SAA, SAK, SAM, SAQ, SGP, SMA, SMG, SMQ, SMS, STP, SVA, SVG, TAA, TAG, TAK, TAM, TAN, TAP, TAQ, TAS, TAT, TAV, TGA, TGC, TGP, TGT, TKA, TKP, TKQ, TKS, TLP, TLQ, TMA, TMG, TMK, TMN, TMP, TMQ, TMS, TMT, TNA, TNQ, TNS, TPP, TQH, TQK, TQM, TQN, TQP, TQQ, TQT, TRW, TSA, TSG, TSH, TSK, TSL, TSM, TSQ, TSS, TST, TSV, TTA, TTG, TTK, TTP, TTQ, TTT, TVA, TVG, TVQ, TVW, VAA, VAG, VAK, VAN, VAQ, VAS, VAT, VGG, VGK, VGN, VGS, VHP, VKA, VKP, VKQ, VLP, VLS, VMA, VMQ, VMS, VNA, VNG, VNS, VQA, VQN, VQP, VQQ, VQS, VQT, VRP, VSA, VSG, VSN, VSQ, VSR, VST, VTA, VTG, VTK, VTP, VTS, TGL, PGW, LSG, LSS, or LVP.
[0193] 51. The isolated AAV particle of any one of embodiments 15 or 46-50, wherein [N4] is or comprises TGW.
[0194] 52. The isolated AAV particle of any one of embodiments 16 or 46-50, wherein [N4] is or comprises LSP.
[0195] 53. The isolated AAV particle of any one of embodiments 15-52, wherein the AAV capsid variant further comprises one, two, or all of an amino acid other than V at position 596 (e.g., D, F, G, L, A, E, or I), an amino acid other than Q at position 597 (e.g., K, R, H, E, L, or P), and/or an amino acid other than N at position 598 (e.g., T, K, H, D, Y, S, I, or P), relative to a reference sequence numbered according to the amino acid sequence of SEQ ID NO: 138.
[0196] 54. The isolated AAV particle of any one of embodiments 15-53, wherein the AAV capsid variant further comprises one, two, or all of an amino acid other than V at position 603 (e.g., D, F, G, L, A, E, or I), an amino acid other than Q at position 604 (e.g., K, R, H, E, L, or P), and/or an amino acid other than N at position 605 (e.g., T, K, H, D, Y, S, I, or P), relative to a reference sequence numbered according to the amino acid sequence of SEQ ID NO: 5, 8, or 3636.
[0197] 55. The isolated AAV particle of any one of embodiments 15-54, wherein the AAV capsid variant further comprises one, two, or all of:
   [0198] (i) the amino acid V, D, F, G, L, A, E, or I at position 596 numbered according to SEQ ID NO: 138 or at position 603 numbered according to SEQ ID NO: 5, 8, or 3636;
   [0199] (ii) the amino acid K, R, H, E, L, or P at position 597 numbered according to SEQ ID NO: 138 or at position 604 numbered according to SEQ ID NO: 5, 8, or 3636; and/or
   [0200] (iii) the amino acid N, T, K, H, D, Y, S, I, or P at position 598 numbered according to the amino acid sequence of SEQ ID NO: 138 or at position 605 numbered according to SEQ ID NO: 5, 8, or 3636.
[0201] 56. The isolated AAV particle of any one of embodiments 15-55, wherein the AAV capsid variant further comprises one, two, or all of:
   [0202] (i) the amino acid V at position 596 numbered according to SEQ ID NO: 138 or at position 603 numbered according to SEQ ID NO: 5, 8, or 3636;
   [0203] (ii) the amino acid K, P, E or H at position 597 numbered according to SEQ ID NO: 138 or at position 604 numbered according to SEQ ID NO: 5, 8, or 3636; and
   [0204] (iii) the amino acid N at position 598 numbered according to the amino acid sequence of SEQ ID NO: 138 or at position 605 numbered according to SEQ ID NO: 5, 8, or 3636.
[0205] 57. The isolated AAV particle of any one of embodiments 16-56, wherein the AAV capsid variant further comprises [N5], wherein [N5] comprises X13, X14, and X15, wherein:
   [0206] (a) position X13 is: V, D, F, G, L, A, E, or I;
   [0207] (b) position X14 is: Q, K, R, H, E, L, or P; and
   [0208] (c) position X15 is: N, T, K, H, D, Y, S, I, or P; and/or
[0209] an amino acid modification, e.g., a conservative substitution, of any of the aforesaid amino acids in (a)-(c).
[0210] 58. The isolated AAV particle of embodiment 57, wherein:
   [0211] (a) position X13 is: V, D, A, F, E, G, or L;
   [0212] (b) position X14 is: Q, K, R, L, or P; and/or
   [0213] (c) position X15 is: N, T, K, H, D, I, K, S, or P.
[0214] 59. The isolated AAV particle of embodiment 57 or 58, wherein position X14 is P.
[0215] 60. The isolated AAV particle of embodiment 57 or 58, wherein position X14 is K.
[0216] 61. The isolated AAV particle of embodiment 57 or 58, wherein position X14 is E or H.
[0217] 62. The isolated AAV particle of embodiment 57 or 58, wherein position X14 is Q.
[0218] 63. The isolated AAV particle of embodiment 57 or 62, wherein [N5] comprises VQ, AQ, DQ, FQ, VL, LQ, EQ, GQ, VP, VR, VK, QN, QS, QT, QK, QH, LN, QI, PN, QD, QP, RN, or KN.
[0219] 64. The isolated AAV particle of any one of embodiments 16 or 57-63, wherein [N5] is or comprises VQN, VKN, VQT, VQK, DQN, VQH, GQN, VQI, VHN, FQN, LQN, VLN, VRN, VQS, VQY, AQN, VEN, VQD, VPN, IQN, VKK, DKN, VKT, VQP, EQN, GQT, FQK, GHN, or VPH.
[0220] 65. The isolated AAV particle of any one of embodiments 16 or 57-64, wherein [N5] is or comprises VQN, AQN, VQS, DQN, VQT, VQK, VQH, FQN, VLN, LQN, VQI, EQN, GQT, VPN, VQD, VQP, VRN, or VKN.
[0221] 66. The isolated AAV particle of any one of embodiments 16 or 57-65, wherein [N5] is or comprises VKN, VPN, VEN, or VHN.
[0222] 67. The isolated AAV particle of any one of embodiments 16 or 57-64, wherein [N5] is or comprises VQN.
[0223] 68. The isolated AAV particle of any one of embodiments 16 or 47-67, wherein [N4]-[N5] is or comprises:

(i)
(SEQ ID NO: 3865)
TGWVQN,
(SEQ ID NO: 3866)
LAAVQN,
(SEQ ID NO: 3867)
LTPVQN,
(SEQ ID NO: 3868)
SAPVQN,
(SEQ ID NO: 3869)
SSPVQN,
(SEQ ID NO: 3870)
TGRVQN,
(SEQ ID NO: 3871)
TGWAQN,
(SEQ ID NO: 3872)
TGWVQS,
(SEQ ID NO: 3873)
TLAVQN,
(SEQ ID NO: 3874)
TTSVQN,
(SEQ ID NO: 3875)
TSPVQN,
(SEQ ID NO: 3876)
TALVQN,
(SEQ ID NO: 3877)
TAWVQN,
(SEQ ID NO: 3878)
TGGVQN,
(SEQ ID NO: 3879)
TGSVQN,
(SEQ ID NO: 3880)
TGWDQN,
(SEQ ID NO: 3881)
TVSVQN,
(SEQ ID NO: 3882)
VSPVQN,
(SEQ ID NO: 3883)
VSSVQN,
(SEQ ID NO: 3884)
AAPVQN,
(SEQ ID NO: 3885)
AGPVQN,
(SEQ ID NO: 3886)
ASPVQN,
(SEQ ID NO: 3887)
ATPVQN,
(SEQ ID NO: 3888)
CSPVQN,
(SEQ ID NO: 3889)
CTPVQN,
(SEQ ID NO: 3890)
IAAVQN,
(SEQ ID NO: 3891)
IAGVQN,
(SEQ ID NO: 3892)
IASVQN,
(SEQ ID NO: 3893)
IGGVQN,
(SEQ ID NO: 3894)
IGSVQN,
(SEQ ID NO: 3895)
ILGVQN,
(SEQ ID NO: 3896)
IQPVQN,
(SEQ ID NO: 3897)
IQSVQN,
(SEQ ID NO: 3898)
ISGVQN,
(SEQ ID NO: 3899)
ISPVQN,
(SEQ ID NO: 3900)
ISSVQN,
(SEQ ID NO: 3901)
ITPVQN,
(SEQ ID NO: 3902)
LAGVQN,
(SEQ ID NO: 3903)
LAHVQN,
(SEQ ID NO: 3904)
LANVQN,
(SEQ ID NO: 3905)
LAPVQN,
(SEQ ID NO: 3906)
LAPVQT,
(SEQ ID NO: 3907)
LAQVQN,
(SEQ ID NO: 3908)
LARVQN,
(SEQ ID NO: 3909)
LASVQN,
(SEQ ID NO: 3910)
LATVQN,
(SEQ ID NO: 3911)
LGPVQN,
(SEQ ID NO: 3912)
LGQVQN,
(SEQ ID NO: 3913)
LGSVQN,
(SEQ ID NO: 3914)
LHPVQN,
(SEQ ID NO: 3915)
LKSVQN,
(SEQ ID NO: 3916)
LMAVQN,
(SEQ ID NO: 3920)
LMGVQN,
(SEQ ID NO: 3921)
LMPVQN,
(SEQ ID NO: 3922)
LMQVQN,
(SEQ ID NO: 3923)
LMSVQN,
(SEQ ID NO: 3924)
LNPVQN,
(SEQ ID NO: 3925)
LQPVQN,
(SEQ ID NO: 3926)
LQQVQN,
(SEQ ID NO: 3927)
LQRVQN,
(SEQ ID NO: 3928)
LSHVQN,
(SEQ ID NO: 3929)
LSKVQN,
(SEQ ID NO: 3930)
LSPVQK,
(SEQ ID NO: 3931)
LSPVQN,
(SEQ ID NO: 3932)
LSQVQN,
(SEQ ID NO: 3933)
LSRVQN,
(SEQ ID NO: 3934)
LSTVQN,
(SEQ ID NO: 3935)
LTAVQN,
(SEQ ID NO: 3936)
LTNVQN,
(SEQ ID NO: 3937)
LTSVQN,
(SEQ ID NO: 3938)
MAPVQN,
(SEQ ID NO: 3939)
NAQVQN,
(SEQ ID NO: 3940)
NASVQN,
(SEQ ID NO: 3941)
NMQVQN,
(SEQ ID NO: 3942)
NSPVQN,
(SEQ ID NO: 3943)
NTPVQN,
(SEQ ID NO: 3944)
NVQVQN,
(SEQ ID NO: 3945)
QAPVQN,
(SEQ ID NO: 3946)
RAAVQN,
(SEQ ID NO: 3947)
RAQVQN,
(SEQ ID NO: 3948)
RASVQN,
(SEQ ID NO: 3949)
RGGVQN,
(SEQ ID NO: 3950)
RGSVQN,
(SEQ ID NO: 3951)
RIAVQN,
(SEQ ID NO: 3952)
RIGVQN,
(SEQ ID NO: 3953)
RIPVQN,
(SEQ ID NO: 3954)
RLGVQN,
(SEQ ID NO: 3955)
RLSVQN,
(SEQ ID NO: 3956)
RMSVQN,
(SEQ ID NO: 3957)
RNSVQN,
(SEQ ID NO: 3958)
RQPVQN,
(SEQ ID NO: 3959)
RSAVQN,
(SEQ ID NO: 3960)
RSGVQN,
(SEQ ID NO: 3961)
RSPVQN,
(SEQ ID NO: 3962)
RSQVQN,
(SEQ ID NO: 3963)
RSSVQN,
(SEQ ID NO: 3964)
RSTVQN,
(SEQ ID NO: 3965)
RTAVQN,
(SEQ ID NO: 3966)
RTGVQN,
(SEQ ID NO: 3967)
RTLVQN,
(SEQ ID NO: 3968)
RTSVQN,
(SEQ ID NO: 3969)
RTTVQN,
(SEQ ID NO: 3970)
RVEVQN,
(SEQ ID NO: 3971)
SAAVQN,
(SEQ ID NO: 3972)
SAKVQN,
(SEQ ID NO: 3973)
SAMVQN,
(SEQ ID NO: 3974)
SAQVQN,
(SEQ ID NO: 3975)
SGPVQN,
(SEQ ID NO: 3976)
SMAVQN,
(SEQ ID NO: 3977)
SMGVQN,
(SEQ ID NO: 3978)
SMQVQN,
(SEQ ID NO: 3979)
SMSVQN,
(SEQ ID NO: 3980)
STPVQN,
(SEQ ID NO: 3981)
SVAVQN,
(SEQ ID NO: 3982)
SVGVQN,
(SEQ ID NO: 3983)
TAAVQN,
(SEQ ID NO: 3984)
TAGVQN,
(SEQ ID NO: 3985)
TAKVQN,
(SEQ ID NO: 3986)
TAMVQN,
(SEQ ID NO: 3987)
TANVQN,
(SEQ ID NO: 3988)
TAPVQN,
(SEQ ID NO: 3989)
TAPVQT,
(SEQ ID NO: 3990)
TAQVQN,
(SEQ ID NO: 3991)
TASVON,
(SEQ ID NO: 3992)
TASVQT,
(SEQ ID NO: 3993)
TATVQN,
(SEQ ID NO: 3994)
TAVVON,
(SEQ ID NO: 3995)
TAWDON,
(SEQ ID NO: 3996)
TAWVQH,
(SEQ ID NO: 3997)
TAWVQT,
(SEQ ID NO: 3998)
TGAVQN,
(SEQ ID NO: 3999)
TGCFQN,
(SEQ ID NO: 3672)
TGGAQN,
(SEQ ID NO: 3673)
TGGFQN,
(SEQ ID NO: 3674)
TGGVLN,
(SEQ ID NO: 3675)
TGGVQH,
(SEQ ID NO: 3676)
TGGVQK,
(SEQ ID NO: 3677)
TGGVQT,
(SEQ ID NO: 3696)
TGPVQN,
(SEQ ID NO: 3697)
TGSAQN,
(SEQ ID NO: 3697)
TGSLQN,
(SEQ ID NO: 3698)
TGSVQH,
(SEQ ID NO: 3699)
TGSVQI,
(SEQ ID NO: 1139)
TGSVQS,
(SEQ ID NO: 1140)
TGSVQT,
(SEQ ID NO: 1141)
TGTVQN,
(SEQ ID NO: 1142)
TGWEQN,
(SEQ ID NO: 1143)
TGWFQN,
(SEQ ID NO: 1144)
TGWGQT,
(SEQ ID NO: 1145)
TGWVPN,
(SEQ ID NO: 1146)
TGWVQD,
(SEQ ID NO: 1147)
TGWVQP,
(SEQ ID NO: 1148)
TGWVQT,
(SEQ ID NO: 1149)
TGWVRN,
(SEQ ID NO: 1150)
TKAVQN,
(SEQ ID NO: 1151)
TKPVQN,
(SEQ ID NO: 1152)
TKQVQN,
(SEQ ID NO: 1153)
TKSVQN,
(SEQ ID NO: 1154)
TLPVQN,
(SEQ ID NO: 1155)
TLQVQN,
(SEQ ID NO: 1156)
TMAVQN,
(SEQ ID NO: 1157)
TMGVQN,
(SEQ ID NO: 1158)
TMKVQN,
(SEQ ID NO: 1159)
TMNVQN,
(SEQ ID NO: 1160)
TMPVQN,
(SEQ ID NO: 1161)
TMQVQN,
(SEQ ID NO: 1162)
TMSVKN,
(SEQ ID NO: 1163)
TMSVQN,
(SEQ ID NO: 1164)
TMSVQT,
(SEQ ID NO: 1165)
TMTVQN,
(SEQ ID NO: 1166)
TNAVQN,
(SEQ ID NO: 1167)
TNQVQN,
(SEQ ID NO: 1168)
TNSVQN,
(SEQ ID NO: 1169)
TPPVQN,
(SEQ ID NO: 1170)
TQHVQN,
(SEQ ID NO: 1171)
TQKVQN,
(SEQ ID NO: 1172)
TQMVQN,
(SEQ ID NO: 1173)
TQNVQN,
(SEQ ID NO: 1174)
TQPVQN,
(SEQ ID NO: 1175)
TQQVQN,
(SEQ ID NO: 1176)
TQTVQN,
(SEQ ID NO: 1177)
TRWDQN,
(SEQ ID NO: 1178)
TSAVQN,
(SEQ ID NO: 1179)
TSGVQN,
(SEQ ID NO: 1180)
TSHVQN,
(SEQ ID NO: 1181)
TSKVQN,
(SEQ ID NO: 1182)
TSLVQN,
(SEQ ID NO: 1183)
TSMVQN,
(SEQ ID NO: 1184)
TSPDQN,
(SEQ ID NO: 1185)
TSQVQN,
(SEQ ID NO: 1186)
TSSVQN,
(SEQ ID NO: 1187)
TSSVQT,
(SEQ ID NO: 1188)
TSTVQN,
(SEQ ID NO: 1189)
TSVVQN,
(SEQ ID NO: 1190)
TTAVQN,
(SEQ ID NO: 1191)
TTGVQN,
(SEQ ID NO: 1192)
TTKVQN,
(SEQ ID NO: 1193)
TTPVQN,
(SEQ ID NO: 1194)
TTPVQT,
(SEQ ID NO: 1195)
TTQVQN,
(SEQ ID NO: 1196)
TTTVQN,
(SEQ ID NO: 1197)
TVAVQN,
(SEQ ID NO: 1198)
TVAVQT,
(SEQ ID NO: 1199)
TVGVQN,
(SEQ ID NO: 1200)
TVQVQN,
(SEQ ID NO: 1201)
TVSVKN,
(SEQ ID NO: 1202)
TVWVQK,
(SEQ ID NO: 1203)
VAAVQN,
(SEQ ID NO: 1204)
VAGVQN,
(SEQ ID NO: 1205)
VAKVON,
(SEQ ID NO: 1206)
VANVQN,
(SEQ ID NO: 1207)
VAQVQN,
(SEQ ID NO: 1208)
VASVQN,
(SEQ ID NO: 1209)
VATVQN,
(SEQ ID NO: 1210)
VGGVQN,
(SEQ ID NO: 1211)
VGKVQN,
(SEQ ID NO: 1212)
VGNVQN,
(SEQ ID NO: 1213)
VGSVQN,
(SEQ ID NO: 1214)
VHPVQN,
(SEQ ID NO: 1215)
VKAVQN,
(SEQ ID NO: 1216)
VKPVQN,
(SEQ ID NO: 1217)
VKQVQN,
(SEQ ID NO: 1218)
VLPVQN,
(SEQ ID NO: 1219)
VLSVQN,
(SEQ ID NO: 1220)
VMAVQN,
(SEQ ID NO: 1221)
VMQVQN,
(SEQ ID NO: 1222)
VMSVQN,
(SEQ ID NO: 1223)
VNAVQN,
(SEQ ID NO: 1224)
VNGVQN,
(SEQ ID NO: 1225)
VNSVQN,
(SEQ ID NO: 1226)
VQAVQN,
(SEQ ID NO: 1227)
VQNVON,
(SEQ ID NO: 1228)
VQPVQN,
(SEQ ID NO: 1229)
VQQVON,
(SEQ ID NO: 1230)
VQSVQN,
(SEQ ID NO: 1231)
VQTVQN,
(SEQ ID NO: 1232)
VRPVQN,
(SEQ ID NO: 1233)
VSAVQN,
(SEQ ID NO: 1234)
VSGVQN,
(SEQ ID NO: 1235)
VSNVQN,
(SEQ ID NO: 1236)
VSPVQT,
(SEQ ID NO: 1237)
VSQVQN,
(SEQ ID NO: 1238)
VSRVQN,
(SEQ ID NO: 1239)
VSSVQK,
(SEQ ID NO: 1240)
VSSVQT,
(SEQ ID NO: 1241)
VSTVQN,
(SEQ ID NO: 1242)
VTAVQN,
(SEQ ID NO: 1243)
VTGVQN,
(SEQ ID NO: 1244)
VTKVQN,
(SEQ ID NO: 1245)
VTPVQN,
(SEQ ID NO: 1246)
VTSVQN,
(SEQ ID NO: 1247)
TGLVQN,
(SEQ ID NO: 1248)
TGWVKN,
(SEQ ID NO: 1249)
PGWVQN,
(SEQ ID NO: 1250)
TGWVQH,
(SEQ ID NO: 1251)
LSGVQN,
(SEQ ID NO: 1252)
LSSVQN,
(SEQ ID NO: 1253)
LVPVQN;

[0224] (ii) an amino acid sequence comprising any portion of an amino acid sequence in (i), e.g., any 2, 3, 4, or 5 amino acids, e.g., consecutive amino acids, thereof;
[0225] (iii) an amino acid sequence comprising at least one, two, or three but no more than four modifications, e.g., substitutions (e.g., conservative substitutions), insertions, or deletions, relative to any of the amino acid sequences in (i); or
[0226] (iv) an amino acid sequence comprising at least one, two, or three but no more than four different amino acids, relative to any one of the amino acid sequences in (i).
[0227] 69. The isolated AAV particle of any one of embodiments 16 or 57-68, wherein [N4]-[N5] is or comprises TGWVQN (SEQ ID NO: 3865), LSPVKN (SEQ ID NO: 1404), or TGWVPN (SEQ ID NO: 1145).
[0228] 70. The isolated AAV particle of any one of embodiments 16-69, wherein:
   [0229] (i) [N1] is or comprises: QLNGA (SEQ ID NO: 3703), PLDGA (SEQ ID NO: 3709), PLDSS (SEQ ID NO: 3723), PLNGA (SEQ ID NO: 3679), ALNGA (SEQ ID NO: 3704), PLNGS (SEQ ID NO: 3705), PLNGG (SEQ ID NO: 3707), SLNGA (SEQ ID NO: 3702), PLNGN (SEQ ID NO: 3711), PLNGT (SEQ ID NO: 3708), ALDGA (SEQ ID NO: 3716), PLDSA (SEQ ID NO: 3719), SLDGA (SEQ ID NO: 3712), TLNGA (SEQ ID NO: 3726), or PINGA (SEQ ID NO: 3715);
   [0230] (ii) [N2] is or comprises: VHLY (SEQ ID NO: 3741), VHHY (SEQ ID NO: 3747), VHVY (SEQ ID NO: 3742), or VHIY(SEQ ID NO: 3746);
   [0231] (iii) [N3] is or comprises AQAQ (SEQ ID NO: 3759), AQPQ (SEQ ID NO: 3761), AKAQ (SEQ ID NO: 3763), DQAQ (SEQ ID NO: 3766), or SQAQ (SEQ ID NO: 3760);
   [0232] (iv) [N4] is or comprises: LSP, TGW, TMS, TTK, TGS, TTS, TSP, TMK, VAQ, TGG, TAW, VKQ, SAP, LSK, LAP, LAQ, VAS, TAK, SAK, TGC, TQK, TGR, TVA, SSP, TTQ, TAQ, RIA, RAS, TTP, LAS, LTP, STP, VSQ, TMQ, TSK, VSP, TVQ, VTA, RQP, ISG, VRP, LGP, TNQ, VQQ, VAN, AAP, RST, TMA, IQP, IAS, TVS, RGS, NSP, LQP, VTG, VMQ, SMA, VGK, IQS, CSP, LQR, TPP, VTK, AGP, LAR, TTT, TLQ, VAK, RAA, TVG, LNP, LSQ, TKP, TNA, LAT, VTP, VQA, CTP, TAG, TSQ, TMN, TST, VKP, ASP, VAA, LKS, IAA, TAA, TKA, VSN, TAP, LMP, LHP, RAQ, LTN, RTT, TSV, TLA, RMS, VGN, LMQ, TAT, VHP, ISS, TRW, TMT, RSS, PGW, RTG, VAT, VTS, VSS, TSS, TNS, VKA, SGP, TGP, TAM, TQP, TQQ, VSR, VLP, LGS, VSA, VLS, TQH, QAP, NAQ, ATP, VQP, TTA, LAA, RSG, LMA, TMP, LAN, VST, SAQ, NTP, TGL, TLP, TAV, RLG, RTL, TQM, ITP, TVW, RSA, TAS, TMG, VQS, ISP, VGG, TAL, LAG, RTA, RSP, LAH, TSL, RLS, LMG, SMQ, TQT, VGS, VSG, VMA, IGG, IAG, LSH, VQT, RNS, TKQ, LGQ, NMQ, NVQ, RGG, VMS, TTG, LSR, MAP, ILG, TGT, TSH, RIG, SAM, TSM, SMG, SMS, TSG, TGA, VNS, VAG, IGS, VNG, LSS, LTA, VQN, TKS, SVG, NAS, TSA, TAN, LTS, RSQ, RIP, LVP, RVE, SVA, LSG, LQQ, LST, SAA, RTS, TQN, VNA, or LMS; and/or
   [0233] (v) [N5] is or comprises: VQN, DQN, VQH, FQN, VQD, VQS, VQT, VRN, AQN, VQP, VPN, VKN, VQK, EQN, VQI, LQN, GQT, or VLN.
[0234] 71. The isolated AAV particle of embodiment 16, wherein:
   [0235] (i) [N1] is or comprises: SLNGA (SEQ ID NO: 3702), QLNGA (SEQ ID NO: 3703), ALNGA (SEQ ID NO: 3704), PLNGS (SEQ ID NO: 3705), PVNGA (SEQ ID NO: 3706), PLNGA (SEQ ID NO: 3679), PLNGG (SEQ ID NO: 3707), PLNGT (SEQ ID NO: 3708), PLDGA (SEQ ID NO: 3709), QLNGS (SEQ ID NO: 3710), PLNGN (SEQ ID NO: 3711), SLDGA (SEQ ID NO: 3712), HLNGA (SEQ ID NO: 3713), ALNGT (SEQ ID NO: 3714), PINGA (SEQ ID NO: 3715), ALDGA (SEQ ID NO: 3716), PLNCA (SEQ ID NO: 3717), PLNGQ (SEQ ID NO: 3718), PLDSA (SEQ ID NO: 3719), RLDGA (SEQ ID NO: 3720), QLNGN (SEQ ID NO: 3721), PLNGY (SEQ ID NO: 3722), or PLDSS (SEQ ID NO: 3723);
   [0236] (ii) [N2] is or comprises: VHLY (SEQ ID NO: 3741) or VHVY (SEQ ID NO: 3742);
   [0237] (iii) [N3] is or comprises: AQAQ (SEQ ID NO: 3759), SQAQ (SEQ ID NO: 3760), AQPQ (SEQ ID NO: 3761), or AQSQ (SEQ ID NO: 3762);
   [0238] (iv) [N4] is or comprises: TGW, TGL, TGS, TGG, TAW, TGR, TAS, LSS, TSS, SSL, SSS, TLS, TVS, VSS, TSP, VSP, TMS, LSP, VAS, TAL, TTS, TLP, VLP, RGW, LSG, LAS, SSP, LLP, STS, TSA, TTP, SAL, LGS, VTP, VSA, IGW, TGF, LTP, TLA, LSA, TVG, TAP, TMP, TSL, VQS, SSM, SLP, VSQ, RSS, TST, VMS, TTA, TQP, LST, LAP, TVA, RLS, TGY, TSG, TAG, VMP, TSQ, TMA, VGS, TSW, TGV, TGT, TLG, LMP, VQP, TGM, SMS, SQL, IGS, RSV, TAA, STP, LSQ, TAQ, TGP, ASP, VSG, SAP, TLQ, LQP, TAT, TGQ, ATS, IGG, VAA, TSM, TVW, TAM, TGA, VAT, QSP, TQA, VQA, RSP, LAT, VAQ, LAA, RST, RTL, LGT, LMS, LGP, RTS, SQP, VLG, SVS, TMQ, SAV, LAG, SGP, TNS, RLT, TTQ, SAA, TSV, RLG, RAS, STQ, CSP, SAG, ALP, VTS, ISP, SVG, LTS, TTT, RSG, TQL, LNP, TVQ, IAS, LAQ, LSR, LSN, TTG, TSN, SMA, TKS, SVA, TQQ, VQQ, RLP, SAM, TAV, TQW, SSR, TQT, VNS, RSA, LMG, RQS, LVG, VTA, RTT, SMG, VMA, TKP, SAQ, NSP, ATP, VAG, RGS, VKP, RMS, NLP, NAL, RTP, RQL, VQG, VTG, VST, NAS, RVE, ATG, AMS, RNS, VMQ, SMQ, LQQ, TMG, LGQ, TSH, AAP, RSQ, TYS, ITP, VAK, TQM, TKA, SQQ, ISG, VSR, RTA, RML, SQM, VAN, CTP, ISS, AGP, TAK, RTG, LHP, TMT, AQP, QAP, RQP, LKS, NTT, TSK, RYS, KSS, NTP, VGG, IAA, LMA, MAP, VHP, VLS, LAN, ATQ, TNA, TAN, VSN, AAA, AVG, LTA, SAN, RAG, RQG, TLR, LSH, SAF, RAA, IQP, ILG, VNG, SVQ, LSK, TNG, RTQ, TMN, RGG, TTR, VRP, VKA, LAR, NQP, TMK, TYA, TQK, TTK, IAG, TQN, LAH, NTQ, RQQ, RAQ, TKQ, TQH, TNQ, LMQ, VNA, VQT, TQR, VGK, VKQ, IQS, LQR, TMM, VGN, RIG, SAK, RIA, VQN, NVQ, RIP, NAQ, NMQ, TPS, LTN, VTK, PGW, LPP, SPP, TPA, or TGC; and/or
   [0239] (v) [N5] is or comprises: VQN, VKN, VQT, VQK, DQN, VQH, GQN, VQI, VHN, FQN, LQN, VLN, VRN, VQS, VQY, AQN, VEN, VQD.
[0240] 72. The isolated AAV particle of any one of embodiments 15, 16, 29, 30, 41, 46, 53 or 57, which comprises:
   [0241] (i) the amino acid sequence of any of SEQ ID NOs: 139-1138;
   [0242] (ii) an amino acid sequence comprising any portion of an amino acid sequence in (i), e.g., any 2, 3, 4, 5, 6, 7, 8, 9, 10, 11, 12, 13, 14, 15, 16, 17, or 18 amino acids, e.g., consecutive amino acids, thereof;
   [0243] (iii) an amino acid sequence comprising at least one, two, or three but no more than four modifications, e.g., substitutions (e.g., conservative substitutions), insertions, or deletions, relative to any of the amino acid sequences in (i); or
   [0244] (iv) an amino acid sequence comprising at least one, two, or three but no more than four different amino acids, relative to any one of the amino acid sequences in (i).
[0245] 73. The isolated AAV particle of any one of embodiments 15-70 or 72, which comprises:
   [0246] (i) the amino acid sequence of any of SEQ ID NOs: 139-476;
   [0247] (ii) an amino acid sequence comprising any portion of an amino acid sequence in (i), e.g., any 2, 3, 4, 5, 6, 7, 8, 9, 10, 11, 12, 13, 14, 15, 16, 17, or 18 amino acids, e.g., consecutive amino acids, thereof;
   [0248] (iii) an amino acid sequence comprising at least one, two, or three but no more than four modifications, e.g., substitutions (e.g., conservative substitutions), insertions, or deletions, relative to any of the amino acid sequences in (i); or
   [0249] (iv) an amino acid sequence comprising at least one, two, or three but no more than four different amino acids, relative to any one of the amino acid sequences in (i).
[0250] 74. An isolated, e.g., recombinant, AAV particle comprising an AAV capsid variant and a nucleic acid comprising a transgene encoding a SOD1 targeting polynucleotide (e.g., a SOD1 targeting RNA agent, e.g., a siRNA duplex), wherein the AAV capsid variant comprises one, two, three, four, or all of:
   [0251] (i) an [N1], wherein [N1] is or comprises: SLNGA (SEQ ID NO: 3702), QLNGA (SEQ ID NO: 3703), ALNGA (SEQ ID NO: 3704), PLNGS (SEQ ID NO: 3705), PVNGA (SEQ ID NO: 3706), PLNGA (SEQ ID NO: 3679), PLNGG (SEQ ID NO: (SEQ ID NO: 3707)), PLNGT (SEQ ID NO: 3708), PLDGA (SEQ ID NO: 3709), QLNGS (SEQ ID NO: 3710), PLNGN (SEQ ID NO: 3711), SLDGA (SEQ ID NO: 3712), HLNGA (SEQ ID NO: 3713), ALNGT (SEQ ID NO: 3714), PINGA (SEQ ID NO: 3715), ALDGA (SEQ ID NO: 3716), PLNCA (SEQ ID NO: 3717), PLNGQ (SEQ ID NO: 3718), PLDSA (SEQ ID NO: 3719), RLDGA (SEQ ID NO: 3720), QLNGN (SEQ ID NO: 3721), PLNGY (SEQ ID NO: 3722), or PLDSS (SEQ ID NO: 3723);
   [0252] (ii) an [N2] wherein [N2] is or comprises: VHLY (SEQ ID NO: 3741) or VHVY (SEQ ID NO: 3742);
   [0253] (iii) an [N3] wherein [N3] is or comprises: AQAQ (SEQ ID NO: 3759), SQAQ (SEQ ID NO: 3760), AQPQ (SEQ ID NO: 3761), or AQSQ (SEQ ID NO: 3762);
   [0254] (iv) an [N4] wherein [N4] is or comprises: TGW, TGL, TGS, TGG, TAW, TGR, TAS, LSS, TSS, SSL, SSS, TLS, TVS, VSS, TSP, VSP, TMS, LSP, VAS, TAL, TTS, TLP, VLP, RGW, LSG, LAS, SSP, LLP, STS, TSA, TTP, SAL, LGS, VTP, VSA, IGW, TGF, LTP, TLA, LSA, TVG, TAP, TMP, TSL, VQS, SSM, SLP, VSQ, RSS, TST, VMS, TTA, TQP, LST, LAP, TVA, RLS, TGY, TSG, TAG, VMP, TSQ, TMA, VGS, TSW, TGV, TGT, TLG, LMP, VQP, TGM, SMS, SQL, IGS, RSV, TAA, STP, LSQ, TAQ, TGP, ASP, VSG, SAP, TLQ, LQP, TAT, TGQ, ATS, IGG, VAA, TSM, TVW, TAM, TGA, VAT, QSP, TQA, VQA, RSP, LAT, VAQ, LAA, RST, RTL, LGT, LMS, LGP, RTS, SQP, VLG, SVS, TMQ, SAV, LAG, SGP, TNS, RLT, TTQ, SAA, TSV, RLG, RAS, STQ, CSP, SAG, ALP, VTS, ISP, SVG, LTS, TTT, RSG, TQL, LNP, TVQ, IAS, LAQ, LSR, LSN, TTG, TSN, SMA, TKS, SVA, TQQ, VQQ, RLP, SAM, TAV, TQW, SSR, TQT, VNS, RSA, LMG, RQS, LVG, VTA, RTT, SMG, VMA, TKP, SAQ, NSP, ATP, VAG, RGS, VKP, RMS, NLP, NAL, RTP, RQL, VQG, VTG, VST, NAS, RVE, ATG, AMS, RNS, VMQ, SMQ, LQQ, TMG, LGQ, TSH, AAP, RSQ, TYS, ITP, VAK, TQM, TKA, SQQ, ISG, VSR, RTA, RML, SQM, VAN, CTP, ISS, AGP, TAK, RTG, LHP, TMT, AQP, QAP, RQP, LKS, NTT, TSK, RYS, KSS, NTP, VGG, IAA, LMA, MAP, VHP, VLS, LAN, ATQ, TNA, TAN, VSN, AAA, AVG, LTA, SAN, RAG, RQG, TLR, LSH, SAF, RAA, IQP, ILG, VNG, SVQ, LSK, TNG, RTQ, TMN, RGG, TTR, VRP, VKA, LAR, NQP, TMK, TYA, TQK, TTK, IAG, TQN, LAH, NTQ, RQQ, RAQ, TKQ, TQH, TNQ, LMQ, VNA, VQT, TQR, VGK, VKQ, IQS, LQR, TMM, VGN, RIG, SAK, RIA, VQN, NVQ, RIP, NAQ, NMQ, TPS, LTN, VTK, PGW, LPP, SPP, TPA, or TGC; and/or
   [0255] (v) an [N5] wherein [N5] is or comprises VQN, VKN, VQT, VQK, DQN, VQH, GQN, VQI, VHN, FQN, LQN, VLN, VRN, VQS, VQY, AQN, VEN, VQD; and/or
   [0256] wherein the AAV capsid variant comprises an amino acid modification, e.g., a conservative substitution, of any of the aforesaid amino acids in (i)-(v).
[0257] 75. The isolated AAV particle of embodiment 71 or 74, wherein the AAV capsid variant comprises:
   [0258] (i) the amino acid sequence of any of SEQ ID NOs: 140, 142-144, 148-150, 154-158, 160, 161, 163, 165, 166, 168, 170, 171, 173-175, 177-179, 181, 182, 184-197, 199-214, 218-222, 224, 225, 227-241, 243-253, 255-262, 265, 267, 268, 270, 271, 273, 274, 276, 277, 279, 282, 284-286, 288-296, 300-310, 312, 315, 317, 318, 320-323, 326, 327, 331, 332, 334, 336, 337, 339, 340, 341, 343, 344, 346, 349, 351, 352, 356-363, 365-367, 369, 370, 372-376, 378-381, 383-389, 392, 393, 395, 397-400, 404, 407, 408, 411, 412, 415, 417, 420-430, 432, 433, 435-438, 441, 442, 446-448, 451-453, 456, 458, 460, 461, 465, 467-469, 471-473, 475, 476, 478, 480, 482, 485, 488, 490, 492, 493, 495, 498, 500-503, 505, 507, 509, 510, 517, 522-526, 528, 535-538, 540, 543-545, 547, 551, 552, 557, 559, 561, 564, 568, 570, 572-574, 577, 585-588, 592-594, 596, 601, 602, 605, 612, 616, 619, 622, 624, 627, 628, 635, 640, 641, 646, 658, 660, 665, 666, 675, 678, 680, 683, 684, 689, 693, 695, 707, 711, 718, 719, 724, 727, 735, 740, 748, 751, 755, 758, 759, 765, 766, 768, 778, 783, 787, 791, 797, 801, 804, 817, 821, 832, 841, 852, 856, 861, 862, 864, 894, 906, 911, 913, 924, 929, 945, 959, 961, 970, 975, 980, 983, 988, 992, 1009, 1015, 1019, 1027, 1032, 1036, 1038, 1047, 1051, 1061, 1077, 1081, 1095, or 1113;
   [0259] (ii) an amino acid sequence comprising any portion of an amino acid sequence in (i), e.g., any 2, 3, 4, 5, 6, 7, 8, 9, 10, 11, 12, 13, 14, 15, 16, 17, or 18 amino acids, e.g., consecutive amino acids, thereof;
   [0260] (iii) an amino acid sequence comprising at least one, two, or three but no more than four modifications, e.g., substitutions (e.g., conservative substitutions), insertions, or deletions, relative to any of the amino acid sequences in (i); or
   [0261] (iv) an amino acid sequence comprising at least one, two, or three but no more than four different amino acids, relative to any one of the amino acid sequences in (i).
[0262] 76. The isolated AAV particle of any one of embodiments 16 or 57-75, wherein [N1]-[N2]-[N3]-[N4]-[N5] is or comprises the amino acid sequence of PLNGAVHLYAQAQTGWVPN (SEQ ID NO: 314).
[0263] 77. The isolated AAV particle of any one of embodiments 16 or 57-75, wherein [N1]-[N2]-[N3]-[N4]-[N5] is or comprises the amino acid sequence of PLNGAVHLYAQAQLSPVKN (SEQ ID NO: 566).
[0264] 78. The isolated AAV particle of any one of embodiments 16 or 57-65, wherein [N1]-[N2]-[N3]-[N4]-[N5] is or comprises the amino acid sequence of PLNGAVHLYAQAQTGWVQN (SEQ ID NO: 476).
[0265] 79. The isolated AAV particle of any one of embodiments 16 or 57-74, wherein [N1]-[N2]-[N3]-[N4]-[N5] is or comprises the amino acid sequence of:
   [0266] (i) the amino acid sequence of any of SEQ ID NOs: 14-17, 40-136, 314, 325, 491, 499, 529, 558, 566, 576, 603, 610, 625, 631, 648, 649, 700, 703, 720, 755, 763, 765, 771, 791, 804, 816, 818, 819, 828, 859, 864, 871, 885, 946, 960, 966, 978, 979, 1016, 1033, 1032, 1037, 1058, 1081, 1100, 1122, or 1174-1193;
   [0267] (ii) an amino acid sequence comprising any portion of an amino acid sequence in (i), e.g., any 2, 3, 4, 5, 6, 7, 8, 9, 10, 11, 12, 13, 14, 15, 16, 17, or 18 amino acids, e.g., consecutive amino acids, thereof;
   [0268] (iii) an amino acid sequence comprising at least one, two, or three but no more than four modifications, e.g., substitutions (e.g., conservative substitutions), insertions, or deletions, relative to any of the amino acid sequences in (i); or
   [0269] (iv) an amino acid sequence comprising at least one, two, or three but no more than four different amino acids, relative to any one of the amino acid sequences in (i).
[0270] 80. The isolated AAV particle of any one of embodiments 15-79, wherein [N1]-[N2] is present in loop VIII.
[0271] 81. The isolated AAV particle of any one of embodiments 16 or 29-80, wherein [N3], [N4], and/or [N5] is present in loop VIII.
[0272] 82. The isolated AAV particle of any one of embodiments 15-81, wherein [N1]-[N2]-[N3]-[N4]-[N5] is present in loop VIII.
[0273] 83. The isolated AAV particle of any one of embodiments 16-82, wherein the AAV capsid variant comprises an amino acid other than A at position 587 and/or an amino acid other than Q at position 588, numbered according to SEQ ID NO: 138.
[0274] 84. The isolated AAV particle of any one of embodiments 15-83, which comprises:
   [0275] (i) the amino acid P, Q, A, H, K, L, R, S, or T (e.g., P, Q, A, S, or T) at position 587, numbered according to SEQ ID NO: 138 or 3636; and/or
   [0276] (ii) the amino acid L, I, V, H, or R (e.g., L or I) at position 588, numbered according to SEQ ID NO: 5, 8, 138 or 3636.
[0277] 85. The isolated AAV particle of any one of embodiments 15-84, wherein [N1] is present immediately subsequent to position 586, relative to a reference sequence numbered according to the amino acid sequence of SEQ ID NO: 138, or 3636.
[0278] 86. The isolated AAV particle of any one of embodiments 15-85, wherein [N1] is present immediately subsequent to position 586, and replaces positions 587 and 588 (e.g., A587 and Q588), numbered according to the amino acid sequence of SEQ ID NO: 138.
[0279] 87. The isolated AAV particle of any one of embodiments 15-86, wherein [N1] replaces positions 587 and 588 (e.g., A587 and Q588), numbered according to the amino acid sequence of SEQ ID NO: 138.
[0280] 88. The isolated AAV particle of any one of embodiments 15-86, wherein [N1] corresponds to positions 587-591 of SEQ ID NO: 5, 8, or 3636.
[0281] 89. The isolated AAV particle of any one of embodiments 16 or 57-88, wherein [N1]-[N2]-[N3]-[N4]-[N5] is present immediately subsequent to position 586, numbered according to the amino acid sequence of SEQ ID NO: 5, 8, 138, or 3636.
[0282] 90. The isolated AAV particle of any one of embodiments 15-89, wherein [N2] is present immediately subsequent to [N1].
[0283] 91. The isolated AAV particle of any one of embodiments 15-90, wherein [N2] is present immediately subsequent to [N1], wherein [N1] is present immediately subsequent to position 586, numbered according to the amino acid sequence of SEQ ID NO: 5, 8, 138 or 3636.
[0284] 92. The isolated AAV particle of any one of embodiments 15-91, wherein [N2] is present immediately subsequent to [N1], wherein [N1] is present immediately subsequent to position 586, relative to a reference sequence numbered according to the amino acid sequence of SEQ ID NO: 5, 8, 138, or 3636.
[0285] 93. The isolated AAV particle of any one of embodiments 15-92, wherein [N2] is present immediately subsequent to [N1], wherein [N1] is present immediately subsequent to position 586 and replaces positions 587 and 588 (e.g., A587 and Q588), numbered according to SEQ ID NO: 138.
[0286] 94. The isolated AAV particle of any one of embodiments 15-93, wherein [N2] corresponds to positions 592-595 of SEQ ID NO: 5, 8, or 3636.
[0287] 95. The isolated AAV particle of any one of embodiments 15-94, wherein [N1]-[N2] replaces positions 587 and 588 (e.g., A587 and Q588), numbered according to SEQ ID NO: 138.
[0288] 96. The isolated AAV particle of any one of embodiments 15-95, wherein [N1]-[N2] is present immediately subsequent to position 586, numbered according to SEQ ID NO: 138.
[0289] 97. The isolated AAV particle of any one of embodiments 15-696, wherein [N1]-[N2] is present immediately subsequent to position 586 and replaces positions 587 and 588 (e.g., A587 and Q588), numbered according to SEQ ID NO: 138.
[0290] 98. The isolated AAV particle of any one of embodiments 15-97, wherein [N1]-[N2] corresponds to positions 587-595 of SEQ ID NO: 5, 8, or 3636.
[0291] 99. The isolated AAV particle of any one of embodiments 16 or 30-98, wherein [N3] is present immediately subsequent to position 588, relative to a reference sequence numbered according to the amino acid sequence of SEQ ID NO: 138.
[0292] 100. The isolated AAV particle of any one of embodiments 15 or 30-99, wherein [N3] replaces positions 589-592 (e.g., A589, Q590, A591, Q592), numbered according to the amino acid sequence of SEQ ID NO: 138.
[0293] 101. The isolated AAV particle of any one of embodiments 15 or 30-100, wherein [N3] is present immediately subsequent to position 588, and replaces positions 589-592 (e.g., A589, Q590, A591, Q592), numbered according to the amino acid sequence of SEQ ID NO: 138.
[0294] 102. The isolated AAV particle of any one of embodiments 15 or 30-101, wherein [N3] corresponds to positions 596-599 of SEQ ID NO: 5, 8, or 3636.
[0295] 103. The isolated AAV particle of any one of embodiments 15 or 30-102, wherein [N1]-[N2]-[N3] is present immediately subsequent to position 586, numbered according to SEQ ID NO: 138.
[0296] 104. The isolated AAV particle of any one of embodiments 15 or 30-103, wherein [N1]-[N2]-[N3] replaces positions 587-592 (e.g., A587, Q588, A589, Q590, A591, Q592), numbered according to SEQ ID NO: 138.
[0297] 105. The isolated AAV particle of any one of embodiments 15 or 30-104, wherein [N1]-[N2]-[N3] is present immediately subsequent to position 586 and replaces positions 587-592 (e.g., A587, Q588, A589, Q590, A591, Q592), numbered according to SEQ ID NO: 138.
[0298] 106. The isolated AAV particle of any one of embodiments 15 or 30-105, wherein [N1]-[N2]-[N3] corresponds to positions 587-599 of SEQ ID NO: 5, 8, or 3636.
[0299] 107. The isolated AAV particle of any one of embodiments 16 or 46-106, wherein [N4] is present immediately subsequent to position 592, relative to a reference sequence numbered according to the amino acid sequence of SEQ ID NO: 138.
[0300] 108. The isolated AAV particle of any one of embodiments 16 or 46-102, wherein [N4] replaces positions 593-595 (e.g., T593, G594, W595), numbered according to the amino acid sequence of SEQ ID NO: 138.
[0301] 109. The isolated AAV particle of any one of embodiments 16 or 46-108, wherein [N4] is present immediately subsequent to position 592, and replaces positions 593-595 (e.g., T593, G594, W595), numbered according to the amino acid sequence of SEQ ID NO: 138.
[0302] 110. The isolated AAV particle of any one of embodiments 16 or 46-109, wherein [N4] corresponds to positions 600-602 of SEQ ID NO: 5, 8, or 3636.
[0303] 111. The isolated AAV particle of any one of embodiments 16 or 46-110, wherein [N3]-[N4] is present immediately subsequent to position 588, numbered according to SEQ ID NO: 138.
[0304] 112. The isolated AAV particle of any one of embodiments 16 or 46-111, wherein [N3]-[N4] replaces positions 589-595 (e.g., A589, Q590, A591, Q592, T593, G594, W595), numbered according to the amino acid sequence of SEQ ID NO: 138.
[0305] 113. The isolated AAV particle of any one of embodiments 16 or 46-112, wherein [N3]-[N4] is present immediately subsequent to 588, and replaces positions 589-595 (e.g., A589, Q590, A591, Q592, T593, G594, W595), numbered according to the amino acid sequence of SEQ ID NO: 138.
[0306] 114. The isolated AAV particle of any one of embodiments 16 or 46-113, wherein [N3]-[N4] corresponds to positions 596-602 of SEQ ID NO: 5, 8, or 3636.
[0307] 115. The isolated AAV particle of any one of embodiments 16 or 46-114, wherein [N1]-[N2]-[N3]-[N4] is present immediately subsequent to position 586, numbered according to SEQ ID NO: 138.
[0308] 116. The isolated AAV particle of any one of embodiments 16 or 46-115, wherein [N1]-[N2]-[N3]-[N4] replaces positions 587-595 (e.g., A587, Q588, A589, Q590, A591, Q592, T593, G594, W595), numbered according to SEQ ID NO: 138.
[0309] 117. The isolated AAV particle of any one of embodiments 16 or 46-116, wherein [N1]-[N2]-[N3]-[N4] is present immediately subsequent to position 586 and replaces positions 587-595 (e.g., A587, Q588, A589, Q590, A591, Q592, T593, G594, W595), numbered according to SEQ ID NO: 138.
[0310] 118. The isolated AAV particle of any one of embodiments 16 or 46-117, wherein [N1]-[N2]-[N3]-[N4] corresponds to positions 587-602 of SEQ ID NO: 5, 8, or 3636.
[0311] 119. The isolated AAV particle of any one of embodiments 16 or 57-118, wherein [N5] is present immediately subsequent to position 595, relative to a reference sequence numbered according to the amino acid sequence of SEQ ID NO: 138.
[0312] 120. The isolated AAV particle of any one of embodiments 16 or 57-119, wherein [N5] replaces positions 596-598 (e.g., V596, Q597, N598), numbered according to the amino acid sequence of SEQ ID NO: 138.
[0313] 121. The isolated AAV particle of any one of embodiments 16 or 57-120, wherein [N5] is present immediately subsequent to position 595, and replaces positions 596-598 (e.g., V596, Q597, N598), numbered according to the amino acid sequence of SEQ ID NO: 138.
[0314] 122. The isolated AAV particle of any one of embodiments 16 or 57-121, wherein [N5] corresponds to positions 603-605 of SEQ ID NO: 5, 8, or 3636.
[0315] 123. The isolated AAV particle of any one of embodiments 16 or 57-122, wherein [N4]-[N5] corresponds to positions 600-605 of SEQ ID NO: 5, 8, or 3636.
[0316] 124. The isolated AAV particle of any one of embodiments 16 or 57-123, wherein [N1]-[N2]-[N3]-[N4]-[N5] replaces positions 587-598 (e.g., A587, Q588, A589, Q590, A591, Q592, T593, G594, W595, V596, Q597, N598), numbered according to SEQ ID NO: 138.
[0317] 125. The isolated AAV particle of any one of embodiments 16 or 57-124, wherein [N1]-[N2]-[N3]-[N4]-[N5] is present immediately subsequent to position 586 and replaces positions 587-598 (e.g., A587, Q588, A589, Q590, A591, Q592, T593, G594, W595, V596, Q597, N598), numbered according to SEQ ID NO: 138.
[0318] 126. The isolated AAV particle of any one of embodiments 16 or 57-125, wherein [N1]-[N2]-[N3]-[N4]-[N5] corresponds to positions 587-605 of SEQ ID NO: 5, 8, or 3636.
[0319] 127. The isolated AAV particle of any one of embodiments 15-126, wherein the AAV capsid variant comprises from N-terminus to C-terminus, [N1]-[N2].
[0320] 128. The isolated AAV particle of any one of embodiments 16 or 30-127, wherein the AAV capsid variant comprises from N-terminus to C-terminus, [N1]-[N2]-[N3].
[0321] 129. The isolated AAV particle of any one of embodiments 16 or 46-127, wherein the AAV capsid variant comprises from N-terminus to C-terminus, [N1]-[N2]-[N3]-[N4].
[0322] 130. The isolated AAV particle of any one of embodiments 16 or 57-129, wherein the AAV capsid variant comprises from N-terminus to C-terminus, [N1]-[N2]-[N3]-[N4]-[N5].
[0323] 131. An isolated, e.g., recombinant, AAV particle comprising an AAV capsid variant and a nucleic acid comprising a transgene encoding a SOD1 targeting polynucleotide (e.g., a SOD1 targeting RNAi), wherein the AAV capsid variant comprises [A][B], wherein [A] comprises the amino acid sequence of PLNGA (SEQ ID NO: 3679), and [B] comprises X1, X2, X3, X4, wherein:
   [0324] (i) X1 is: V, I, L, A, F, D, or G;
   [0325] (ii) X2 is: H, N, Q, P, D, L, R, or Y;
   [0326] (iii) X3 is: L, H, I, R, or V; and
   [0327] (iv) X4 is Y; and/or
   [0328] wherein the AAV capsid variant comprises an amino acid modification, e.g., a conservative substitution, of any of the aforesaid amino acids in (i)-(iv);
   [0329] optionally wherein the AAV capsid variant further comprises one, two, or all of an amino acid other than T at position 593 (e.g., a V, S, L, R, I, A, N, C, Q, M, P, or K), an amino acid other than G at position 594 (e.g., T, M, A, K, S, Q, V, I, R, N, P, L, H, or Y), and/or an amino acid other than W at position 595 (e.g., K, Q, S, P, C, A, G, N, T, R, V, M, H, L, E, F, or Y), relative to a reference sequence numbered according to the amino acid sequence of SEQ ID NO: 138; and/or
   [0330] (ii) one, two, or all of an amino acid other than V at position 596 (e.g., a D, F, A, E, L, G, or I), an amino acid other than Q at position 597 (e.g., P, K, R, L, H, or E), and/or an amino acid other than N at position 598 (e.g., H, S, T, P, K, I, D, or Y), relative to a reference sequence numbered according to the amino acid sequence of SEQ ID NO: 138.
[0331] 132. The isolated AAV particle of embodiment 131, wherein:
   [0332] (i) X1 is V;
   [0333] (ii) X2 is H;
   [0334] (iii) X3 is L, H, or I; and
   [0335] (iv) X4 is Y.
[0336] 133. The isolated AAV particle of embodiment 131 or 132, wherein [B] comprises:
   [0337] (i) VH, VN, VQ, IH, LH, VP, VD, AH, FH, DH, VL, GH, VR, VY, LY, HY, IY, RY, HL, HH, HI, NL, QL, PL, DL, HR, LL, RL, HV, or YL; or
   [0338] (ii) VH, LY, HY, IY, HL, HH, or HI.
[0339] 134. The isolated AAV particle of any one of embodiments 131-133, wherein [B] comprises:
   [0340] (i) VHL, VHH, VHI, VNL, VQL, IHL, LHL, VPL, VDL, AHL, VHR, FHL, DHL, VLL, GHL, VRL, VHV, VYL, HLY, HHY, HIY, NLY, QLY, PLY, DLY, HRY, LLY, RLY, HVY, YLY;
   [0341] (ii) VHL, VHH, VHI, HLY, HHY, or HIY.
[0342] 135. The isolated AAV particle of any one of embodiments 131-134, wherein [B] is or comprises:
   [0343] (i) VHLY (SEQ ID NO: 3741), VHHY (SEQ ID NO: 3747), VHIY (SEQ ID NO: 3746), VNLY (SEQ ID NO: 3744), VQLY (SEQ ID NO: 3751), IHLY(SEQ ID NO: 3752), LHLY (SEQ ID NO: 3749), VPLY(SEQ ID NO: 3743), VDLY (SEQ ID NO: 3753), AHLY (SEQ ID NO: 3754), VHRY (SEQ ID NO: 3745), FHLY (SEQ ID NO: 3748), DHLY (SEQ ID NO: 3750), VLLY (SEQ ID NO: 3755), GHLY (SEQ ID NO: 3756), VRLY (SEQ ID NO: 3757), VHVY (SEQ ID NO: 3742), or VYLY (SEQ ID NO: 3758) or a substitution, e.g., a conservative substitution, of any of the aforesaid amino acid sequences; or
   [0344] (ii) VHLY (SEQ ID NO: 3741), VHHY (SEQ ID NO: 3747), or VHIY (SEQ ID NO: 3746) or a substitution, e.g., a conservative substitution, of any of the aforesaid amino acid sequences.
[0345] 136. The isolated AAV particle of any one of embodiments 131-135, wherein [B] is or comprises VHLY (SEQ ID NO: 3741).
[0346] 137. The isolated AAV particle of any one of embodiments 131-135, wherein [A][B] is or comprises:

(i)
(SEQ ID NO: 3681)
PLNGAVH,
(SEQ ID NO: 1254)
PLNGAVN,
(SEQ ID NO: 1255)
PLNGAVQ,
(SEQ ID NO: 1256)
PLNGAIH,
(SEQ ID NO: 1257)
PLNGALH,
(SEQ ID NO: 1258)
PLNGAVP,
(SEQ ID NO: 1259)
PLNGAVD,
(SEQ ID NO: 1260)
PLNGAAH,
(SEQ ID NO: 1261)
PLNGAFH,
(SEQ ID NO: 1263)
PLNGADH,
(SEQ ID NO: 1264)
PLNGAVL,
(SEQ ID NO: 1265)
PLNGAGH,
(SEQ ID NO: 1266)
PLNGAVR,
or
(SEQ ID NO: 1267)
PLNGAVY;
or
(ii)
(SEQ ID NO: 3681)
PLNGAVH;

[0347] (iii) amino acid sequence comprising any portion of an amino acid sequence in (i) or (ii), e.g., any 2, 3, 4, 5, or 6 amino acids, e.g., consecutive amino acids, thereof;
[0348] (iv) an amino acid sequence comprising at least one, two, or three but no more than four modifications, e.g., substitutions (e.g., conservative substitutions), insertions, or deletions, relative to any of the amino acid sequences in (i) or (ii); or
[0349] (v) an amino acid sequence comprising at least one, two, or three but no more than four different amino acids, relative to any one of the amino acid sequences in (i) or (ii).
[0350] 138. The isolated AAV particle of any one of embodiments 131-137, wherein [A][B] is or comprises:

(i)
(SEQ ID NO: 3648)
PLNGAVHLY,
(SEQ ID NO: 3810)
PLNGAVHHY,
(SEQ ID NO: 3808)
PLNGAVHIY,
(SEQ ID NO: 1268)
PLNGAVNLY,
(SEQ ID NO: 1269)
PLNGAVQLY,
(SEQ ID NO: 1270)
PLNGAIHLY,
(SEQ ID NO: 1271)
PLNGALHLY,
(SEQ ID NO: 1272)
PLNGAVPLY,
(SEQ ID NO: 1273)
PLNGAVDLY,
(SEQ ID NO: 1274)
PLNGAAHLY,
(SEQ ID NO: 1275)
PLNGAVHRY,
(SEQ ID NO: 1276)
PLNGAFHLY,
(SEQ ID NO: 1277)
PLNGADHLY,
(SEQ ID NO: 1278)
PLNGAVLLY,
(SEQ ID NO: 1279)
PLNGAGHLY,
(SEQ ID NO: 1280)
PLNGAVRLY,
(SEQ ID NO: 1281)
PLNGAVHVY,
or
(SEQ ID NO: 1282)
PLNGAVYLY;
(ii)
(SEQ ID NO: 3648)
PLNGAVHLY,
(SEQ ID NO: 3810)
PLNGAVHHY,
or
(SEQ ID NO: 3808)
PLNGAVHIY;

[0351] (iii) amino acid sequence comprising any portion of an amino acid sequence in (i) or (ii), e.g., any 2, 3, 4, 5, 6, 7, or 8 amino acids, e.g., consecutive amino acids, thereof;
[0352] (iv) an amino acid sequence comprising at least one, two, or three but no more than four modifications, e.g., substitutions (e.g., conservative substitutions), insertions, or deletions, relative to any of the amino acid sequences in (i) or (ii); or
[0353] (v) an amino acid sequence comprising at least one, two, or three but no more than four different amino acids, relative to any one of the amino acid sequences in (i) or (ii).
[0354] 139. The isolated AAV particle of any one of embodiments 131-138, wherein [A][B] is or comprises PLNGAVHLY (SEQ ID NO: 3648).
[0355] 140. The isolated AAV particle of any one of embodiments 131-138, wherein the AAV capsid variant further comprises one, two, three, or all of an amino acid other than A at position 589 (e.g., D, S, or T), an amino acid other than Q at position 590 (e.g., K, H, L, P, or R), an amino acid other than A at position 591 (e.g., P or E), and/or an amino acid other than Q at position 592 (e.g., H, K, or P).
[0356] 141. The isolated AAV particle of any one of embodiments 131-140, which further comprises one, two, three, or all of an amino acid other than A at position 596 (e.g., D, S, or T), an amino acid other than Q at position 597 (e.g., K, H, L, P, or R), an amino acid other than A at position 598 (e.g., P or E), and/or an amino acid other than Q at position 599 (e.g., H, K, or P), relative to a reference sequence numbered according to the amino acid sequence of SEQ ID NO: 5, 8, or 3636.
[0357] 142. The isolated AAV particle of any one of embodiments 131-141, which further comprises:
   [0358] (i) A at position 589, Q at position 590, A at position 591, and/or Q at position 592, numbered according to the amino acid sequence of SEQ ID NO: 138; or
   [0359] (ii) A at position 596, Q at position 597, A at position 598, and/or Q at position 599, numbered according to the amino acid sequence of SEQ ID NO: 5, 8, or 3636.
[0360] 143. The isolated AAV particle of any one of embodiments 131-140, wherein the AAV capsid variant further comprises [C], wherein [C] comprises X4, X5, X6, and X7, wherein:
   [0361] (a) position X4 is: A, D, S, or T;
   [0362] (b) position X5 is: Q, K, H, L, P, or R;
   [0363] (c) position X6 is: A, P, or E; and
   [0364] (d) position X7 is: Q, H, K, or P; and/or
[0365] an amino acid modification, e.g., a conservative substitution, of any of the aforesaid amino acids in (a)-(d).
[0366] 144. The isolated AAV particle of embodiment 143, wherein:
   [0367] (a) position X4 is: A, D, or S;
   [0368] (b) position X5 is Q or K;
   [0369] (c) position X6 is A or P; and/or
   [0370] (d) position X7 is Q.
[0371] 145. The isolated AAV particle of embodiment 143 or 144, wherein [C] comprises:
   [0372] (i) AQ, AK, DQ, SQ, AH, AL, AP, AR, TQ, PQ, EQ, QA, QP, KA, HA, QE, LA, PA, or RA; or
   [0373] (ii) AQ, AK, DQ, SQ, PQ, QA, QP, or KA.
[0374] 146. The isolated AAV particle of any one of embodiments 143-145, wherein [C] comprises:
   [0375] (i) AQA, AQP, AKA, DQA, SQA, AHA, AQE, ALA, APA, ARA, TQA, QAQ, QPQ, KAQ, HAQ, QEQ, QAK, LAQ, PAQ, RAQ, QAH, or QAP; or
   [0376] (ii) AQA, AQP, AKA, DQA, SQA, QAQ, QPQ, or KAQ.
[0377] 147. The isolated AAV particle of any one of embodiments 143-146, wherein [C] is or comprises:
   [0378] (i) AQAQ (SEQ ID NO: 3759), AQPQ (SEQ ID NO: 3761), AKAQ (SEQ ID NO: 3763), DQAQ (SEQ ID NO: 3766), SQAQ (SEQ ID NO: 3760), AHAQ (SEQ ID NO: 3764), AQEQ (SEQ ID NO: 3770), AQAK (SEQ ID NO: 3768), ALAQ (SEQ ID NO: 3771), APAQ (SEQ ID NO: 3767), ARAQ SEQ ID NO: 3772), AQAH (SEQ ID NO: 3769), AQAP (SEQ ID NO: 3765), or TQAQ (SEQ ID NO: 3773), or a substitution, e.g., a conservative substitution, of any of the aforesaid amino acid sequences; or
   [0379] (ii) AQAQ (SEQ ID NO: 3759), AQPQ (SEQ ID NO: 3761), AKAQ (SEQ ID NO: 3763), DQAQ (SEQ ID NO: 3766), or SQAQ (SEQ ID NO: 3760).
[0380] 148. The isolated AAV particle of any one of embodiments 143-147, wherein [C] is or comprises AQAQ (SEQ ID NO: 3759).
[0381] 149. The isolated AAV particle of any one of embodiments 143-148, wherein [B][C] is or comprises:

(i)
(SEQ ID NO: 3811)
VHLYAQAQ,
(SEQ ID NO: 3818)
VHHYAQAQ,
(SEQ ID NO: 3812)
VHLYAQPQ,
(SEQ ID NO: 3814)
VHLYAKAQ,
(SEQ ID NO: 3815)
VHLYDQAQ,
(SEQ ID NO: 3813)
VHLYSQAQ,
(SEQ ID NO: 3816)
VHIYAQAQ,
(SEQ ID NO: 1283)
VHLYAHAQ,
(SEQ ID NO: 1284)
VNLYAQAQ,
(SEQ ID NO: 1285)
VQLYAQAQ,
(SEQ ID NO: 1286)
VHLYAQEQ,
(SEQ ID NO: 1287)
IHLYAQAQ,
(SEQ ID NO: 1288)
LHLYAQAQ,
(SEQ ID NO: 1289)
VPLYAQAQ,
(SEQ ID NO: 1290)
VHLYAQAK,
(SEQ ID NO: 1291)
VDLYAQAQ,
(SEQ ID NO: 1292)
AHLYAQAQ,
(SEQ ID NO: 1293)
VHRYAQAQ,
(SEQ ID NO: 1294)
FHLYAQAQ,
(SEQ ID NO: 1295)
VHLYALAQ,
(SEQ ID NO: 1296)
DHLYAQAQ,
(SEQ ID NO: 1297)
VHLYAPAQ,
(SEQ ID NO: 1298)
VHLYARAQ,
(SEQ ID NO: 1299)
VHLYAQAH,
(SEQ ID NO: 1300)
VLLYAQAQ,
(SEQ ID NO: 1301)
VHLYAQAP,
(SEQ ID NO: 1302)
GHLYAQAQ,
(SEQ ID NO: 1303)
VRLYAQAQ,
(SEQ ID NO: 3817)
VHVYAQAQ,
(SEQ ID NO: 1304)
VYLYAQAQ,
(SEQ ID NO: 1305)
VHLYTQAQ;
(ii)
(SEQ ID NO: 3811)
VHLYAQAQ,
(SEQ ID NO: 3818)
VHHYAQAQ,
(SEQ ID NO: 3812)
VHLYAQPQ,
(SEQ ID NO: 3814)
VHLYAKAQ,
(SEQ ID NO: 3815)
VHLYDQAQ,
(SEQ ID NO: 3813)
VHLYSQAQ,
(SEQ ID NO: 3816)
VHIYAQAQ;

[0382] (iii) amino acid sequence comprising any portion of an amino acid sequence in (i) or (ii), e.g., any 2, 3, 4, 5, 6, or 7 amino acids, e.g., consecutive amino acids, thereof;
[0383] (iv) an amino acid sequence comprising at least one, two, or three but no more than four modifications, e.g., substitutions (e.g., conservative substitutions), insertions, or deletions, relative to any of the amino acid sequences in (i) or (ii); or
[0384] (v) an amino acid sequence comprising at least one, two, or three but no more than four different amino acids, relative to any one of the amino acid sequences in (i) or (ii).
[0385] 150. The isolated AAV particle of any one of embodiments 143-149, wherein [B][C] is or comprises VHLYAQAQ (SEQ ID NO: 3811).
[0386] 151. The isolated AAV particle of any one of embodiments 143-150, wherein [A][B][C] comprises:

(i)
(SEQ ID NO: 3840)
PLNGAVHLYAQ,
PLNGAVHHYAQ,
(SEQ ID NO: 3826)
PLNGAVHLYAK,
(SEQ ID NO: 3828)
PLNGAVHLYDQ,
(SEQ ID NO: 3829)
PLNGAVHLYSQ,
(SEQ ID NO: 3838)
PLNGAVHIYAQ,
(SEQ ID NO: 1306)
PLNGAVHLYAH,
(SEQ ID NO: 1307)
PLNGAVNLYAQ,
(SEQ ID NO: 1308)
PLNGAVQLYAQ,
(SEQ ID NO: 1309)
PLNGAIHLYAQ,
(SEQ ID NO: 1310)
PLNGALHLYAQ,
(SEQ ID NO: 1311)
PLNGAVPLYAQ,
(SEQ ID NO: 1312)
PLNGAVDLYAQ,
(SEQ ID NO: 1313)
PLNGAAHLYAQ,
(SEQ ID NO: 1314)
PLNGAVHRYAQ,
(SEQ ID NO: 1315)
PLNGAFHLYAQ,
(SEQ ID NO: 1316)
PLNGAVHLYAL,
(SEQ ID NO: 1317)
PLNGADHLYAQ,
(SEQ ID NO: 1318)
PLNGAVHLYAP,
(SEQ ID NO: 1319)
PLNGAVHLYAR,
(SEQ ID NO: 1320)
PLNGAVLLYAQ,
(SEQ ID NO: 1321)
PLNGAGHLYAQ,
(SEQ ID NO: 1322)
PLNGAVRLYAQ,
(SEQ ID NO: 1323)
PLNGAVHVYAQ,
(SEQ ID NO: 1324)
PLNGAVYLYAQ,
(SEQ ID NO: 1325)
PLNGAVHLYTQ,
(ii)
(SEQ ID NO: 3827)
PLNGAVHLYAQ,
(SEQ ID NO: 3840)
PLNGAVHHYAQ,
(SEQ ID NO: 3826)
PLNGAVHLYAK,
(SEQ ID NO: 3828)
PLNGAVHLYDQ,
(SEQ ID NO: 3829)
PLNGAVHLYSQ,
(SEQ ID NO: 3838)
PLNGAVHIYAQ;

[0387] (iii) amino acid sequence comprising any portion of an amino acid sequence in (i) or (ii), e.g., any 2, 3, 4, 5, 6, 7, 8, 9, or 10 amino acids, e.g., consecutive amino acids, thereof;
[0388] (iv) an amino acid sequence comprising at least one, two, or three but no more than four modifications, e.g., substitutions (e.g., conservative substitutions), insertions, or deletions, relative to any of the amino acid sequences in (i) or (ii); or
[0389] (v) an amino acid sequence comprising at least one, two, or three but no more than four different amino acids, relative to any one of the amino acid sequences in (i) or (ii).
[0390] 152. The isolated AAV particle of any one of embodiments 143-151, wherein [A][B][C] is or comprises:

(i)
(SEQ ID NO: 3850)
PLNGAVHLYAQAQ,
(SEQ ID NO: 3864)
PLNGAVHHYAQAQ,
(SEQ ID NO: 3851)
PLNGAVHLYAQPQ,
(SEQ ID NO: 3849)
PLNGAVHLYAKAQ,
(SEQ ID NO: 3852)
PLNGAVHLYDQAQ,
(SEQ ID NO: 3853)
PLNGAVHLYSQAQ,
(SEQ ID NO: 3862)
PLNGAVHIYAQAQ,
(SEQ ID NO: 1326)
PLNGAVHLYAHAQ,
(SEQ ID NO: 1327)
PLNGAVNLYAQAQ,
(SEQ ID NO: 1328)
PLNGAVQLYAQAQ,
(SEQ ID NO: 1329)
PLNGAVHLYAQEQ,
(SEQ ID NO: 1330)
PLNGAIHLYAQAQ,
(SEQ ID NO: 1331)
PLNGALHLYAQAQ,
(SEQ ID NO: 1332)
PLNGAVPLYAQAQ,
(SEQ ID NO: 1333)
PLNGAVHLYAQAK,
(SEQ ID NO: 1334)
PLNGAVDLYAQAQ,
(SEQ ID NO: 1335)
PLNGAAHLYAQAQ,
(SEQ ID NO: 1336)
PLNGAVHRYAQAQ,
(SEQ ID NO: 1337)
PLNGAFHLYAQAQ,
(SEQ ID NO: 1338)
PLNGAVHLYALAQ,
(SEQ ID NO: 1339)
PLNGADHLYAQAQ,
(SEQ ID NO: 1340)
PLNGAVHLYAPAQ,
(SEQ ID NO: 1341)
PLNGAVHLYARAQ,
(SEQ ID NO: 1342)
PLNGAVHLYAQAH,
(SEQ ID NO: 1343)
PLNGAVLLYAQAQ,
(SEQ ID NO: 1344)
PLNGAVHLYAQAP,
(SEQ ID NO: 1345)
PLNGAGHLYAQAQ,
(SEQ ID NO: 1346)
PLNGAVRLYAQAQ,
(SEQ ID NO: 1347)
PLNGAVHVYAQAQ,
(SEQ ID NO: 1348)
PLNGAVYLYAQAQ,
(SEQ ID NO: 1349)
PLNGAVHLYTQAQ,
(ii)
(SEQ ID NO: 3850)
PLNGAVHLYAQAQ,
(SEQ ID NO: 3864)
PLNGAVHHYAQAQ,
(SEQ ID NO: 3851)
PLNGAVHLYAQPQ,
(SEQ ID NO: 3849)
PLNGAVHLYAKAQ,
(SEQ ID NO: 3852)
PLNGAVHLYDQAQ,
(SEQ ID NO: 3853)
PLNGAVHLYSQAQ,
(SEQ ID NO: 3862)
PLNGAVHIYAQAQ;

[0391] (iii) amino acid sequence comprising any portion of an amino acid sequence in (i) or (ii), e.g., any 2, 3, 4, 5, 6, 7, 8, 9, 10, 11, or 12 amino acids, e.g., consecutive amino acids, thereof;
[0392] (iv) an amino acid sequence comprising at least one, two, or three but no more than four modifications, e.g., substitutions (e.g., conservative substitutions), insertions, or deletions, relative to any of the amino acid sequences in (i) or (ii); or
[0393] (v) an amino acid sequence comprising at least one, two, or three but no more than four different amino acids, relative to any one of the amino acid sequences in (i) or (ii).
[0394] 153. The isolated AAV particle of any one of embodiments 143-152, wherein [A][B][C] is or comprises PLNGAVHLYAQAQ (SEQ ID NO: 3850).
[0395] 154. The isolated AAV particle of any one of embodiment 131-153, wherein the AAV capsid variant further comprises one, two, or all of an amino acid other than T at position 593 (e.g., a V, S, L, R, I, A, N, C, Q, M, P, or K), an amino acid other than G at position 594 (e.g., T, M, A, K, S, Q, V, I, R, N, P, L, H, or Y), and/or an amino acid other than W at position 595 (e.g., K, Q, S, P, C, A, G, N, T, R, V, M, H, L, E, F, or Y), relative to a reference sequence numbered according to the amino acid sequence of SEQ ID NO: 138.
[0396] 155. The isolated AAV particle of any one of embodiment 131-154, which further comprises one, two, or all of an amino acid other than T at position 600 (e.g., a V, S, L, R, I, A, N, C, Q, M, P, or K), an amino acid other than G at position 601 (e.g., T, M, A, K, S, Q, V, I, R, N, P, L, H, or Y), and/or an amino acid other than W at position 602 (e.g., K, Q, S, P, C, A, G, N, T, R, V, M, H, L, E, F, or Y), relative to a reference sequence numbered according to the amino acid sequence of SEQ ID NO: 5, 8, 3636.
[0397] 156. The isolated AAV particle of any one of embodiment 131-155, which further comprises one, two, three or all of:
   [0398] (i) the amino acid V, S, L, R, I, A, N, C, Q, M, P, or K (e.g., L) at position 593 numbered according to SEQ ID NO: 138 or at position 600 numbered according to SEQ ID NO: or 3636;
   [0399] (ii) the amino acid T, M, A, K, S, Q, V, I, R, N, P, L, H, or Y (e.g., S) at position 594 numbered according to SEQ ID NO: 138, or at position 601 numbered according to SEQ ID NO: 5, 8, or 3636; and/or
   [0400] (iii) the amino acid K, Q, S, P, C, A, G, N, T, R, V, M, H, L, E, F, or Y (e.g. P) at position 595 numbered according to SEQ ID NO: 138 or at position 602 numbered according to SEQ ID NO: 5, 8, or 3636).
[0401] 157. The isolated AAV particle of any one of embodiment 131-155, which further comprises:
   [0402] (i) the amino acid L at position 593 numbered according to SEQ ID NO: 138 or at position 600 numbered according to SEQ ID NO: 5, 8, or 3636;
   [0403] (ii) the amino acid S at position 594 numbered according to SEQ ID NO: 138, or at position 601 numbered according to SEQ ID NO: 5, 8, or 3636; and
   [0404] (iii) the amino acid P at position 595 numbered according to SEQ ID NO: 138 or at position 602 numbered according to SEQ ID NO: 5, 8, or 3636).
[0405] 158. The isolated AAV particle of any one of embodiment 131-152, which further comprises:
   [0406] (i) T at position 593, G at position 594, and/or W at position 595, numbered according to SEQ ID NO: 138;
   [0407] (ii) T at position 600, G at position 601, and/or W at position 602, numbered according to SEQ ID NO: 5, 8, or 3636.
[0408] 159. The isolated AAV particle of any one of embodiments 131-158, wherein the AAV capsid variant further comprises [D], wherein [D] comprises X8, X9, and X10, wherein:
   [0409] (a) position X8 is: T, V, S, L, R, I, A, N, C, Q, M, P, or K;
   [0410] (b) position X9 is: T, M, A, G, K, S, Q, V, I, R, N, P, L, H, or Y; and
   [0411] (c) position X10 is: K, Q, W, S, P, C, A, G, N, T, R, V, M, H, L, E, F, or Y; and/or
   [0412] an amino acid modification, e.g., a conservative substitution, of any of the aforesaid amino acids in (a)-(c).
[0413] 160. The isolated AAV particle of embodiment 159, wherein:
   [0414] (a) position X8 is: T, V, S, L, R, I, A, N, C, Q, or M;
   [0415] (b) position X9 is: T, M, A, G, K, S, Q, V, I, R, N, P, L, or H; and/or
   [0416] (c) position X10 is: K, Q, W, S, P, C, A, G, N, T, R, V, M, H, L, or E.
[0417] 161. The isolated AAV particle of embodiment 159 or 160, wherein [D] is or comprises:
   [0418] (i) TT, TM, VA, TA, TG, VK, SA, LS, LA, TQ, TV, RI, RA, LT, ST, TS, VS, VT, RQ, IS, VR, LG, TN, VQ, AA, RS, IQ, IA, RG, NS, LQ, VM, SM, VG, CS, TP, SS, AG, TL, LN, TK, CT, AS, LK, LM, LH, RT, RM, VH, TR, SG, VL, QA, NA, AT, NT, RL, IT, IG, RN, NM, NV, MA, IL, VN, SV, RV, PG, QS, RY, SQ, NQ, LL, LP, AQ, TY, NL, SP, LV, KG, VP, AV, KS, AM, SL, AL, RP, IP, MK, AW, GS, KQ, AP, SK, AK, GC, QK, MQ, QP, GP, QQ, AN, GK, QR, PP, AR, GG, MS, NP, KP, MN, KA, SN, MP, HP, GN, RW, MT, SR, GW, QH, GL, QM, VW, MG, AH, QT, GR, SH, GQ, GT, GA, NG, QN, VE, MM, QL, QG, YS, GM, LR, AF, PQ, SW, QW, YA, ML, GF, PA, PS, PT, GY, GV, PW, PR; or
   [0419] (ii) TT, TM, VA, TA, TG, VK, SA, LS, LA, TQ, TV, RI, RA, LT, ST, TS, VS, VT, RQ, IS, VR, LG, TN, VQ, AA, RS, IQ, IA, RG, NS, LQ, VM, SM, VG, CS, TP, SS, AG, TL, LN, TK, CT, AS, LK, LM, LH, RT, RM, VH, TR, SG, VL, QA, NA, AT, NT, RL, IT, IG, RN, NM, NV, MA, IL, VN, SV, RV, MK, AQ, AW, GS, KQ, AP, SK, AK, GC, QK, SP, MQ, SQ, QP, RP, GP, NQ, QQ, AN, GK, QS, QR, PP, AR, GG, MS, NP, KP, MN, KS, KA, SN, MP, HP, GN, RW, MT, AM, SR, GW, QH, GL, AV, QM, VW, MG, AL, AH, SL, QT, GR, SH, LP, GQ, GT, GA, NG, QN, IP, or VE.
[0420] 162. The isolated AAV particle of any one of embodiments 159-161, wherein [D] is or comprises:
   [0421] (i) TTK, TMK, VAQ, TAW, TGS, VKQ, SAP, LSK, LAP, LAQ, TAK, SAK, TGC, TQK, TVA, LSP, TTQ, TAQ, RIA, RAS, TTP, LTP, STP, TSP, TMQ, TSK, VSQ, VSP, TVQ, VTA, RQP, ISG, VRP, LGP, TNQ, VQQ, VAN, AAP, RST, TMA, IQP, IAS, TVS, RGS, NSP, LQP, VTG, VMQ, SMA, VGK, IQS, CSP, LQR, TPP, VTK, SSP, AGP, LAR, TTT, TGG, TLQ, TMS, VAK, RAA, TVG, LNP, LSQ, TKP, TNA, LAT, VTP, VQA, TTS, CTP, TAG, TSQ, TMN, TST, VKP, ASP, VAA, LKS, IAA, TAA, TKA, VSN, TAP, LMP, LHP, RAQ, LTN, RTT, TSV, RMS, VGN, LMQ, TAT, VHP, ISS, VAS, TRW, TMT, RSS, RTG, VAT, VTS, VSS, TNS, VKA, SGP, TGP, TAM, TQP, TQQ, VSR, TGW, VSA, VLS, TQH, LAS, QAP, NAQ, ATP, VQP, TTA, LAA, RSG, LMA, TMP, LAN, VST, SAQ, NTP, TGL, TAV, RLG, RTL, TQM, ITP, TVW, RSA, TAS, TMG, VQS, ISP, VGG, TAL, LAG, RTA, RSP, TLA, LAH, TSL, RLS, LMG, SMQ, TQT, VGS, VSG, VMA, IGG, IAG, TGR, LSH, VQT, RNS, TLP, TKQ, LGQ, NMQ, NVQ, RGG, VMS, TTG, LSR, MAP, ILG, TGT, TSS, TSH, RIG, SAM, TSM, SMG, SMS, TSG, TGA, VNS, VAG, IGS, LGS, VNG, LTA, VQN, TKS, SVG, NAS, TSA, TAN, LTS, RSQ, RIP, RVE, VLP, SVA, LQQ, LST, SAA, RTS, TQN, VNA, LMS, TMM, RSV, TQL, RTP, RQQ, VQG, PGW, STQ, QSP, RYS, TQR, SAG, RQS, SQP, STS, VLG, NQP, LGT, RAG, TGM, LSN, RLP, RQG, RLT, TLR, SAF, SVQ, LLP, RTQ, LPP, AQP, TPQ, TSW, NTT, TTR, TQW, NTQ, TYA, TLS, NLP, ATS, ATQ, LSS, TQA, VMP, NAL, RML, RQL, TLG, TGF, SAL, SQL, LSA, TGQ, TNG, AAA, SAV, LSG, SSR, SPP, LVG, TPA, KGW, VPP, ATG, SAN, SQQ, SSM, AVG, VAP, TPS, RGW, SSL, TYS, TPT, IGW, KSS, TGY, RSL, SVS, TSN, SQM, VPA, AMS, TPG, TGV, VPQ, SLP, ALP, TPW, TPR, SSS, RPP, IPP, AGW, or RPG, or a substitution, e.g., a conservative substitution, of any of the aforesaid amino acid sequences; or
   [0422] (ii) TTK, TMK, VAQ, TAW, TGS, VKQ, SAP, LSK, LAP, LAQ, TAK, SAK, TGC, TQK, TVA, LSP, TTQ, TAQ, RIA, RAS, TTP, LTP, STP, TSP, TMQ, TSK, VSQ, VSP, TVQ, VTA, RQP, ISG, VRP, LGP, TNQ, VQQ, VAN, AAP, RST, TMA, IQP, IAS, TVS, RGS, NSP, LQP, VTG, VMQ, SMA, VGK, IQS, CSP, LQR, TPP, VTK, SSP, AGP, LAR, TTT, TGG, TLQ, TMS, VAK, RAA, TVG, LNP, LSQ, TKP, TNA, LAT, VTP, VQA, TTS, CTP, TAG, TSQ, TMN, TST, VKP, ASP, VAA, LKS, IAA, TAA, TKA, VSN, TAP, LMP, LHP, RAQ, LTN, RTT, TSV, RMS, VGN, LMQ, TAT, VHP, ISS, VAS, TRW, TMT, RSS, RTG, VAT, VTS, VSS, TNS, VKA, SGP, TGP, TAM, TQP, TQQ, VSR, TGW, VSA, VLS, TQH, LAS, QAP, NAQ, ATP, VQP, TTA, LAA, RSG, LMA, TMP, LAN, VST, SAQ, NTP, TGL, TAV, RLG, RTL, TQM, ITP, TVW, RSA, TAS, TMG, VQS, ISP, VGG, TAL, LAG, RTA, RSP, TLA, LAH, TSL, RLS, LMG, SMQ, TQT, VGS, VSG, VMA, IGG, IAG, TGR, LSH, VQT, RNS, TLP, TKQ, LGQ, NMQ, NVQ, RGG, VMS, TTG, LSR, MAP, ILG, TGT, TSS, TSH, RIG, SAM, TSM, SMG, SMS, TSG, TGA, VNS, VAG, IGS, LGS, VNG, LTA, VQN, TKS, SVG, NAS, TSA, TAN, LTS, RSQ, RIP, RVE, VLP, SVA, LQQ, LST, SAA, RTS, TQN, VNA, or LMS.
[0423] 163. The isolated AAV particle of any one of embodiments 159-162, wherein [D] is or comprises TGW.
[0424] 164. The isolated AAV particle of any one of embodiments 159-163, wherein [D] is or comprises LSP.
[0425] 165. The isolated AAV particle of any one of embodiments 131-164, wherein the AAV capsid variant further comprises one, two, or all of an amino acid other than V at position 596 (e.g., D, F, A, E, L, G, or I), an amino acid other than Q at position 597 (e.g., R, P, K, L, H, or E), and/or an amino acid other than N at position 598 (e.g., H, S, T, P, K, I, D, or Y), relative to a reference sequence numbered according to the amino acid sequence of SEQ ID NO: 138.
[0426] 166. The isolated AAV particle of any one of embodiments 131-165, which further comprises one, two, or all of an amino acid other than V at position 603 (e.g., D, F, A, E, L, G, or I), an amino acid other than Q at position 604 (e.g., R, P, K, L, H, or E), and/or an amino acid other than N at position 605 (e.g., H, S, T, P, K, I, D, or Y), relative to a reference sequence numbered according to the amino acid sequence of SEQ ID NO: 5, 8, or 3636.
[0427] 167. The isolated AAV particle of any one of embodiments 131-166, which further comprises one, two, or all of:
   [0428] (i) the amino acid D, F, A, E, L, G, or I at position 596, numbered according to SEQ ID NO: 138, or at position 603 numbered according to SEQ ID NO: 5, 8, or 3636;
   [0429] (ii) the amino acid R, P, K, L, H, or E at position 597, numbered according to SEQ ID NO: 138, or at position 604 numbered according to SEQ ID NO: 5, 8, or 3636; and/or
   [0430] (iii) the amino acid H, S, T, P, K, I, D, or Y at position 598, numbered according to SEQ ID NO: 138, or at position 605 numbered according to SEQ ID NO: 5, 8, or 3636.
[0431] 168. The isolated AAV particle of any one of embodiments 131-167, which further comprises P, K, E, or H at position 597, numbered according to SEQ ID NO: 138.
[0432] 169. The isolated AAV particle of any one of embodiments 131-168, which further comprises one, two, or all of:
   [0433] (i) the amino acid V at position 596 numbered according to SEQ ID NO: 138 or at position 603 numbered according to SEQ ID NO: 5, 8, or 3636;
   [0434] (ii) the amino acid K, P, E or H at position 597 numbered according to SEQ ID NO: 138 or at position 604 numbered according to SEQ ID NO: 5, 8, or 3636; and
   [0435] (iii) the amino acid N at position 598 numbered according to the amino acid sequence of SEQ ID NO: 138 or at position 605 numbered according to SEQ ID NO: 5, 8, or 3636.
[0436] 170. The isolated AAV particle of any one of embodiments 131-169, wherein the AAV capsid variant further comprises [E], wherein [E] comprises X11, X12, and X13, wherein:
   [0437] (a) position X11 is: V, D, F, A, E, L, G, or I;
   [0438] (b) position X12 is: Q, R, P, K, L, H, or E; and
   [0439] (c) position X13 is: N, H, S, T, P, K, I, D, or Y; or
[0440] an amino acid modification, e.g., a conservative substitution, of any of the aforesaid amino acids in (a)-(c).
[0441] 171. The isolated AAV particle of embodiment 170, wherein:
   [0442] (a) position X11 is: V, D, F, A, E, L, or G;
   [0443] (b) position X12 is: Q, R, P, K, or L; and/or
   [0444] (c) position X13 is: N, H, S, T, P, K, I, or D.
[0445] 172 The isolated AAV particle of embodiment 170 or 171, wherein:
   [0446] (a) position X11 is V;
   [0447] (b) position X12: Q, R, P, K, or L; and/or
   [0448] (c) position X13 is: N.
[0449] 173. The isolated AAV particle of any one of embodiments 170-172, wherein position X12 is P.
[0450] 174. The isolated AAV particle of any one of embodiments 170-172, wherein position X12 is K.
[0451] 175. The isolated AAV particle of any one of embodiments 170-172, wherein position X12 is E or H.
[0452] 176. The isolated AAV particle of any one of embodiment 170-175, wherein [E] comprises:
   [0453] (i) VQ, DQ, FQ, VR, VP, VK, AQ, EQ, LQ, GQ, VL, VH, VE, DK, GH, IQ, QN, QH, QS, QT, QP, RN, PN, KN, QK, QI, LN, QD, HN, KT, KK, EN, QY, or PH; or
   [0454] (ii) VQ, DQ, FQ, VR, VP, VK, AQ, EQ, LQ, GQ, VL, QN, QH, QS, QT, QP, RN, PN, KN, QK, QI, LN, or QD.
[0455] 177. The isolated AAV particle of any one of embodiments 170-176, wherein [E] is or comprises:
   [0456] (i) VQN, DQN, VQH, FQN, VQS, VQT, VQP, VRN, VPN, VKN, AQN, VQK, EQN, VQI, LQN, GQT, VLN, VQD, VHN, GQN, VKT, VKK, FQK, VEN, VQY, DKN, GHN, IQN, or VPH; or
   [0457] (ii) VQN, DQN, VQH, FQN, VQS, VQT, VQP, VRN, VPN, VKN, AQN, VQK, EQN, VQI, LQN, GQT, VLN, or VQD.
[0458] 178. The isolated AAV particle of any one of embodiments 170-177, wherein [E] is or comprises VQN, VPN, or VKN.
[0459] 179. The isolated AAV particle of any one of embodiments 170-178, wherein [E] is or comprises VEN, VHN, VKN, or VPN.
[0460] 180. The isolated AAV particle of any one of embodiments 170-179, wherein [D][E] is or comprises:

(i)
(SEQ ID NO: 1192)
TTKVQN,
(SEQ ID NO: 1158)
TMKVQN,
(SEQ ID NO: 1207)
VAQVQN,
(SEQ ID NO: 3995)
TAWDQN,
(SEQ ID NO: 3698)
TGSVQH,
(SEQ ID NO: 1217)
VKQVQN,
(SEQ ID NO: 3868)
SAPVQN,
(SEQ ID NO: 3929)
LSKVQN,
(SEQ ID NO: 3905)
LAPVQN,
(SEQ ID NO: 3907)
LAQVQN,
(SEQ ID NO: 3985)
TAKVON,
(SEQ ID NO: 3972)
SAKVQN,
(SEQ ID NO: 3999)
TGCFQN,
(SEQ ID NO: 1171)
TQKVQN,
(SEQ ID NO: 1197)
TVAVQN,
(SEQ ID NO: 3931)
LSPVQN,
(SEQ ID NO: 1195)
TTQVQN,
(SEQ ID NO: 3990)
TAQVQN,
(SEQ ID NO: 3951)
RIAVQN,
(SEQ ID NO: 3948)
RASVQN,
(SEQ ID NO: 1193)
TTPVQN,
(SEQ ID NO: 3867)
LTPVQN,
(SEQ ID NO: 3980)
STPVQN,
(SEQ ID NO: 3875)
TSPVQN,
(SEQ ID NO: 1161)
TMQVQN,
(SEQ ID NO: 1181)
TSKVQN,
(SEQ ID NO: 1237)
VSQVQN,
(SEQ ID NO: 3882)
VSPVQN,
(SEQ ID NO: 1200)
TVQVQN,
(SEQ ID NO: 1242)
VTAVQN,
(SEQ ID NO: 3958)
RQPVQN,
(SEQ ID NO: 3898)
ISGVQN,
(SEQ ID NO: 1232)
VRPVQN,
(SEQ ID NO: 3911)
LGPVQN,
(SEQ ID NO: 1167)
TNQVQN,
(SEQ ID NO: 1229)
VQQVQN,
(SEQ ID NO: 1206)
VANVQN,
(SEQ ID NO: 3884)
AAPVQN,
(SEQ ID NO: 3964)
RSTVQN,
(SEQ ID NO: 1156)
TMAVQN,
(SEQ ID NO: 3896)
IQPVQN,
(SEQ ID NO: 3892)
IASVQN,
(SEQ ID NO: 3881)
TVSVQN,
(SEQ ID NO: 3950)
RGSVQN,
(SEQ ID NO: 3942)
NSPVQN,
(SEQ ID NO: 3925)
LQPVQN,
(SEQ ID NO: 1243)
VTGVQN,
(SEQ ID NO: 1221)
VMQVQN,
(SEQ ID NO: 3976)
SMAVQN,
(SEQ ID NO: 1211)
VGKVQN,
(SEQ ID NO: 3897)
IQSVQN,
(SEQ ID NO: 3888)
CSPVQN,
(SEQ ID NO: 3927)
LQRVQN,
(SEQ ID NO: 3996)
TAWVQH,
(SEQ ID NO: 1169)
TPPVQN,
(SEQ ID NO: 1244)
VTKVQN,
(SEQ ID NO: 3869)
SSPVQN,
(SEQ ID NO: 3885)
AGPVQN,
(SEQ ID NO: 3908)
LARVQN,
(SEQ ID NO: 1196)
TTTVQN,
(SEQ ID NO: 3673)
TGGFQN,
(SEQ ID NO: 1155)
TLQVQN,
(SEQ ID NO: 1163)
TMSVQN,
(SEQ ID NO: 1205)
VAKVQN,
(SEQ ID NO: 3946)
RAAVQN,
(SEQ ID NO: 1199)
TVGVQN,
(SEQ ID NO: 3924)
LNPVQN,
(SEQ ID NO: 3932)
LSQVQN,
(SEQ ID NO: 1151)
TKPVQN,
(SEQ ID NO: 1166)
TNAVQN,
(SEQ ID NO: 3910)
LATVQN,
(SEQ ID NO: 1245)
VTPVQN,
(SEQ ID NO: 1226)
VQAVQN,
(SEQ ID NO: 3874)
TTSVQN,
(SEQ ID NO: 3889)
CTPVQN,
(SEQ ID NO: 3984)
TAGVQN,
(SEQ ID NO: 1185)
TSQVQN,
(SEQ ID NO: 1159)
TMNVQN,
(SEQ ID NO: 1188)
TSTVQN,
(SEQ ID NO: 1216)
VKPVQN,
(SEQ ID NO: 3886)
ASPVQN,
(SEQ ID NO: 1203)
VAAVQN,
(SEQ ID NO: 3915)
LKSVQN,
(SEQ ID NO: 3890)
IAAVQN,
(SEQ ID NO: 3983)
TAAVQN,
(SEQ ID NO: 1150)
TKAVQN,
(SEQ ID NO: 1139)
TGSVQS,
(SEQ ID NO: 1235)
VSNVQN,
(SEQ ID NO: 3988)
TAPVQN,
(SEQ ID NO: 3921)
LMPVQN,
(SEQ ID NO: 3914)
LHPVQN,
(SEQ ID NO: 3947)
RAQVQN,
(SEQ ID NO: 3936)
LTNVQN,
(SEQ ID NO: 3969)
RTTVQN,
(SEQ ID NO: 1189)
TSVVQN,
(SEQ ID NO: 3956)
RMSVQN,
(SEQ ID NO: 1212)
VGNVQN,
(SEQ ID NO: 3922)
LMQVQN,
(SEQ ID NO: 3993)
TATVQN,
(SEQ ID NO: 1214)
VHPVQN,
(SEQ ID NO: 1236)
VSPVQT,
(SEQ ID NO: 3900)
ISSVQN,
(SEQ ID NO: 1208)
VASVQN,
(SEQ ID NO: 1177)
TRWDQN,
(SEQ ID NO: 1165)
TMTVQN,
(SEQ ID NO: 3963)
RSSVQN,
(SEQ ID NO: 3877)
TAWVQN,
(SEQ ID NO: 3966)
RTGVQN,
(SEQ ID NO: 1209)
VATVQN,
(SEQ ID NO: 1246)
VTSVQN,
(SEQ ID NO: 3883)
VSSVQN,
(SEQ ID NO: 1168)
TNSVQN,
(SEQ ID NO: 1215)
VKAVQN,
(SEQ ID NO: 3975)
SGPVQN,
(SEQ ID NO: 3696)
TGPVQN,
(SEQ ID NO: 3986)
TAMVQN,
(SEQ ID NO: 1174)
TQPVQN,
(SEQ ID NO: 1175)
TQQVQN,
(SEQ ID NO: 1238)
VSRVQN,
(SEQ ID NO: 1147)
TGWVQP,
(SEQ ID NO: 1233)
VSAVQN,
(SEQ ID NO: 1219)
VLSVQN,
(SEQ ID NO: 1170)
TQHVQN,
(SEQ ID NO: 3909)
LASVQN,
(SEQ ID NO: 3945)
QAPVQN,
(SEQ ID NO: 3939)
NAQVQN,
(SEQ ID NO: 3887)
ATPVQN,
(SEQ ID NO: 1228)
VQPVQN,
(SEQ ID NO: 1190)
TTAVQN,
(SEQ ID NO: 1149)
TGWVRN,
(SEQ ID NO: 3866)
LAAVQN,
(SEQ ID NO: 1184)
TSPDQN,
(SEQ ID NO: 3960)
RSGVQN,
(SEQ ID NO: 3677)
TGGVQT,
(SEQ ID NO: 1145)
TGWVPN,
(SEQ ID NO: 1194)
TTPVQT,
(SEQ ID NO: 3916)
LMAVQN,
(SEQ ID NO: 1160)
TMPVQN,
(SEQ ID NO: 3904)
LANVQN,
(SEQ ID NO: 1241)
VSTVQN,
(SEQ ID NO: 3974)
SAQVQN,
(SEQ ID NO: 3943)
NTPVQN,
(SEQ ID NO: 1240)
VSSVQT,
(SEQ ID NO: 1201)
TVSVKN,
(SEQ ID NO: 1247)
TGLVQN,
(SEQ ID NO: 3879)
TGSVQN,
(SEQ ID NO: 3672)
TGGAQN,
(SEQ ID NO: 3994)
TAVVQN,
(SEQ ID NO: 3954)
RLGVQN,
(SEQ ID NO: 3967)
RTLVQN,
(SEQ ID NO: 1172)
TQMVQN,
(SEQ ID NO: 3901)
ITPVQN,
(SEQ ID NO: 1202)
TVWVQK,
(SEQ ID NO: 3959)
RSAVQN,
(SEQ ID NO: 3991)
TASVQN,
(SEQ ID NO: 1157)
TMGVQN,
(SEQ ID NO: 3675)
TGGVQH,
(SEQ ID NO: 1230)
VQSVQN,
(SEQ ID NO: 3878)
TGGVQN,
(SEQ ID NO: 3899)
ISPVQN,
(SEQ ID NO: 1248)
TGWVKN,
(SEQ ID NO: 3697)
TGSAQN,
(SEQ ID NO: 3871)
TGWAQN,
(SEQ ID NO: 1164)
TMSVQT,
(SEQ ID NO: 1210)
VGGVQN,
(SEQ ID NO: 3906)
LAPVQT,
(SEQ ID NO: 3876)
TALVQN,
(SEQ ID NO: 3902)
LAGVQN,
(SEQ ID NO: 3965)
RTAVQN,
(SEQ ID NO: 3961)
RSPVQN,
(SEQ ID NO: 3873)
TLAVQN,
(SEQ ID NO: 3903)
LAHVQN,
(SEQ ID NO: 1182)
TSLVQN,
(SEQ ID NO: 3955)
RLSVQN,
(SEQ ID NO: 3978)
LMGVQN,
SMQVQN,
(SEQ ID NO: 1176)
TQTVQN,
(SEQ ID NO: 1142)
TGWEQN,
(SEQ ID NO: 1213)
VGSVQN,
(SEQ ID NO: 1234)
VSGVQN,
(SEQ ID NO: 1220)
VMAVQN,
(SEQ ID NO: 3893)
IGGVQN,
(SEQ ID NO: 3891)
IAGVQN,
(SEQ ID NO: 3870)
TGRVQN,
(SEQ ID NO: 3928)
LSHVQN,
(SEQ ID NO: 1231)
VQTVQN,
(SEQ ID NO: 3880)
TGWDQN,
(SEQ ID NO: 3957)
RNSVQN,
(SEQ ID NO: 1154)
TLPVQN,
(SEQ ID NO: 1152)
TKQVQN,
(SEQ ID NO: 3912)
LGQVQN,
(SEQ ID NO: 3941)
NMQVQN,
(SEQ ID NO: 3944)
NVQVQN,
(SEQ ID NO: 3699)
TGSVQI,
(SEQ ID NO: 3949)
RGGVQN,
(SEQ ID NO: 1222)
VMSVQN,
(SEQ ID NO: 1191)
TTGVQN,
(SEQ ID NO: 3930)
LSPVQK,
(SEQ ID NO: 3933)
LSRVQN,
(SEQ ID NO: 1239)
VSSVQK,
(SEQ ID NO: 3989)
TAPVQT,
(SEQ ID NO: 3938)
MAPVQN,
(SEQ ID NO: 3895)
ILGVQN,
(SEQ ID NO: 3992)
TASVQT,
(SEQ ID NO: 3697)
TGSLQN,
(SEQ ID NO: 1141)
TGTVQN,
(SEQ ID NO: 1140)
TGSVQT,
(SEQ ID NO: 1187)
TSSVQT,
(SEQ ID NO: 1180)
TSHVQN,
(SEQ ID NO: 3952)
RIGVQN,
(SEQ ID NO: 1144)
TGWGQT,
(SEQ ID NO: 3973)
SAMVQN,
(SEQ ID NO: 1183)
TSMVQN,
(SEQ ID NO: 3977)
SMGVQN,
(SEQ ID NO: 3979)
SMSVQN,
(SEQ ID NO: 1186)
TSSVQN,
(SEQ ID NO: 1179)
TSGVQN,
(SEQ ID NO: 3998)
TGAVQN,
(SEQ ID NO: 1225)
VNSVQN,
(SEQ ID NO: 1204)
VAGVQN,
(SEQ ID NO: 3894)
IGSVQN,
(SEQ ID NO: 3913)
LGSVQN,
(SEQ ID NO: 1224)
VNGVQN,
(SEQ ID NO: 3935)
LTAVQN,
(SEQ ID NO: 1227)
VQNVQN,
(SEQ ID NO: 1153)
TKSVQN,
(SEQ ID NO: 3982)
SVGVQN,
(SEQ ID NO: 3997)
TAWVQT,
(SEQ ID NO: 3940)
NASVQN,
(SEQ ID NO: 1178)
TSAVQN,
(SEQ ID NO: 1162)
TMSVKN,
(SEQ ID NO: 3987)
TANVQN,
(SEQ ID NO: 1143)
TGWFQN,
(SEQ ID NO: 3674)
TGGVLN,
(SEQ ID NO: 3937)
LTSVQN,
(SEQ ID NO: 1148)
TGWVQT,
(SEQ ID NO: 3962)
RSQVQN,
(SEQ ID NO: 3953)
RIPVQN,
(SEQ ID NO: 1146)
TGWVQD,
(SEQ ID NO: 3970)
RVEVQN,
(SEQ ID NO: 1218)
VLPVQN,
(SEQ ID NO: 3676)
TGGVQK,
(SEQ ID NO: 3981)
SVAVQN,
(SEQ ID NO: 3926)
LQQVQN,
(SEQ ID NO: 3934)
LSTVQN,
(SEQ ID NO: 3971)
SAAVQN,
(SEQ ID NO: 3968)
RTSVQN,
(SEQ ID NO: 1173)
TQNVQN,
(SEQ ID NO: 1223)
VNAVQN,
(SEQ ID NO: 1198)
TVAVQT,
(SEQ ID NO: 3923)
LMSVQN,
(SEQ ID NO: 3865)
TGWVQN,
(SEQ ID NO: 1250)
TGWVQH,
(SEQ ID NO: 3872)
TGWVQS,
(SEQ ID NO: 1350)
TMMVQN,
(SEQ ID NO: 1351)
TGGVQS,
(SEQ ID NO: 1352)
TGSFQN,
(SEQ ID NO: 1353)
RSVVQN,
(SEQ ID NO: 1354)
TGSVQK,
(SEQ ID NO: 1355)
TQLVQN,
(SEQ ID NO: 1356)
TGGVHN,
(SEQ ID NO: 1357)
RTPVQN,
(SEQ ID NO: 1358)
RQQVQN,
(SEQ ID NO: 1359)
TGSVRN,
(SEQ ID NO: 1360)
VQGVQN,
(SEQ ID NO: 1361)
PGWVQT,
(SEQ ID NO: 1362)
STQVQN,
(SEQ ID NO: 1363)
QSPVQN,
(SEQ ID NO: 1364)
RYSVQN,
(SEQ ID NO: 1365)
TQRVQN,
(SEQ ID NO: 1366)
SAGVQN,
(SEQ ID NO: 1367)
SAPVQT,
(SEQ ID NO: 1368)
RQSVQN,
(SEQ ID NO: 1369)
SQPVQN,
(SEQ ID NO: 1370)
VASVKN,
(SEQ ID NO: 1371)
TAWVRN,
(SEQ ID NO: 1372)
TGGGQN,
(SEQ ID NO: 1373)
STSVQN,
(SEQ ID NO: 1374)
VLGVQN,
(SEQ ID NO: 1375)
NQPVQN,
(SEQ ID NO: 1376)
LGTVQN,
(SEQ ID NO: 1377)
RAGVQN,
(SEQ ID NO: 1378)
TGGVKN,
(SEQ ID NO: 1379)
TAWLQN,
(SEQ ID NO: 1380)
TRWVQK,
(SEQ ID NO: 1381)
LAPVKN,
(SEQ ID NO: 1382)
TGSVQD,
(SEQ ID NO: 1383)
TGMVQN,
(SEQ ID NO: 1384)
LSNVQN,
(SEQ ID NO: 1385)
RLPVQN,
(SEQ ID NO: 1386)
RQGVQN,
(SEQ ID NO: 1387)
STPVQT,
(SEQ ID NO: 1388)
TTPVKN,
(SEQ ID NO: 1389)
RLTVQN,
(SEQ ID NO: 1390)
TLRVQN,
(SEQ ID NO: 1391)
SAFVQN,
(SEQ ID NO: 1392)
SVQVQN,
(SEQ ID NO: 1393)
LLPVQN,
(SEQ ID NO: 1394)
RTQVQN,
(SEQ ID NO: 1395)
TGSDQN,
(SEQ ID NO: 1396)
VASDQN,
(SEQ ID NO: 1397)
VSPVKN,
(SEQ ID NO: 1398)
LPPVQN,
(SEQ ID NO: 1399)
SSPVQT,
(SEQ ID NO: 1400)
AQPVQN,
(SEQ ID NO: 1401)
TPQVQN,
(SEQ ID NO: 1402)
TSWVQN,
(SEQ ID NO: 1403)
TGGDQN,
(SEQ ID NO: 1404)
LSPVKN,
(SEQ ID NO: 1405)
SSPVKN,
(SEQ ID NO: 1406)
NTTVQN,
(SEQ ID NO: 1407)
TTRVQN,
(SEQ ID NO: 1408)
TQWVQN,
(SEQ ID NO: 1409)
TGSVHN,
(SEQ ID NO: 1410)
TGGLQN,
(SEQ ID NO: 1411)
TAWVQK,
(SEQ ID NO: 1412)
TGRVQT,
(SEQ ID NO: 1413)
NTQVQN,
(SEQ ID NO: 1414)
TGWLQN,
(SEQ ID NO: 1415)
TYAVQN,
(SEQ ID NO: 1416)
TLSVQN,
(SEQ ID NO: 1417)
NLPVQN,
(SEQ ID NO: 1418)
TSSDQN,
(SEQ ID NO: 1419)
ATSVQN,
(SEQ ID NO: 1420)
TAWFQN,
(SEQ ID NO: 1421)
ATQVQN,
(SEQ ID NO: 1422)
VSSVKN,
(SEQ ID NO: 1252)
LSSVQN,
(SEQ ID NO: 1423)
TGSGQN,
(SEQ ID NO: 1424)
LQPVQT,
(SEQ ID NO: 1225)
VSAVKN,
(SEQ ID NO: 1426)
TQAVQN,
(SEQ ID NO: 1427)
TGWVQK,
(SEQ ID NO: 1428)
VMPVQN,
(SEQ ID NO: 1429)
TVSVQK,
(SEQ ID NO: 1430)
TAWAQN,
(SEQ ID NO: 1431)
NALVQN,
(SEQ ID NO: 1432)
RMLVQN,
(SEQ ID NO: 1433)
TVAVKN,
(SEQ ID NO: 1434)
RQLVQN,
(SEQ ID NO: 1435)
TLGVQN,
(SEQ ID NO: 1436)
LGPVQT,
(SEQ ID NO: 1437)
TGSVKN,
(SEQ ID NO: 1438)
TMSDQN,
(SEQ ID NO: 1439)
LASVKN,
(SEQ ID NO: 1440)
TGFVQN,
(SEQ ID NO: 1441)
SALVQN,
(SEQ ID NO: 1442)
TGWVKT,
(SEQ ID NO: 1442)
SQLVQN,
(SEQ ID NO: 1443)
TGWGQN,
(SEQ ID NO: 1444)
LSAVQN,
(SEQ ID NO: 1445)
TMQVQT,
(SEQ ID NO: 1446)
TGQVQN,
(SEQ ID NO: 1447)
TSPVKN,
(SEQ ID NO: 1448)
LSQVQT,
(SEQ ID NO: 1449)
TGSVLN,
(SEQ ID NO: 1450)
TNGVQN,
(SEQ ID NO: 1451)
TGWVKK,
(SEQ ID NO: 1452)
AAAVQN,
(SEQ ID NO: 1453)
SAVVQN,
(SEQ ID NO: 1454)
PGWVQH,
(SEQ ID NO: 1455)
TASDON,
(SEQ ID NO: 1251)
LSGVQN,
(SEQ ID NO: 1456)
SSRVQN,
(SEQ ID NO: 1457)
SPPVQN,
(SEQ ID NO: 1458)
VQPVQT,
(SEQ ID NO: 1459)
TSSVKN,
(SEQ ID NO: 1460)
LSPLQN,
(SEQ ID NO: 1461)
VSQVQK,
(SEQ ID NO: 1462)
LVGVQN,
(SEQ ID NO: 1463)
TLSVKN,
(SEQ ID NO: 1464)
TGWFQK,
(SEQ ID NO: 1465)
TPAVQN,
(SEQ ID NO: 1466)
TVGVKN,
(SEQ ID NO: 1467)
KGWDQN,
(SEQ ID NO: 1468)
TAWVLN,
(SEQ ID NO: 1469)
VPPVQN,
(SEQ ID NO: 1470)
ATGVQN,
(SEQ ID NO: 1471)
TGGVQI,
(SEQ ID NO: 1472)
TGWVLN,
(SEQ ID NO: 1473)
TAWGQN,
(SEQ ID NO: 1474)
TGWVHN,
(SEQ ID NO: 1475)
LGSVQT,
(SEQ ID NO: 1476)
SANVQN,
(SEQ ID NO: 1477)
TGGVQD,
(SEQ ID NO: 1478)
TMAVKN,
(SEQ ID NO: 1479)
TASVKN,
(SEQ ID NO: 1480)
SSPVQK,
(SEQ ID NO: 1481)
TGTVQT,
(SEQ ID NO: 1482)
TGWVQI,
(SEQ ID NO: 1483)
TVWVKN,
(SEQ ID NO: 1484)
SQQVQN,
(SEQ ID NO: 1485)
VGSVQT,
(SEQ ID NO: 1486)
SSMVQN,
(SEQ ID NO: 1487)
TSPVQK,
(SEQ ID NO: 1488)
AVGVQN,
(SEQ ID NO: 1489)
VAPVQN,
(SEQ ID NO: 1490)
TLPVQK,
(SEQ ID NO: 1491)
TGRVQH,
(SEQ ID NO: 1492)
TPSVQN,
(SEQ ID NO: 1493)
TGWVEN,
(SEQ ID NO: 1494)
RGWVQN,
(SEQ ID NO: 1495)
TGSVEN,
(SEQ ID NO: 1496)
SSLVQN,
(SEQ ID NO: 1497)
TAWVKN,
(SEQ ID NO: 1498)
TYSVQN,
(SEQ ID NO: 1499)
LAAVQT,
(SEQ ID NO: 1500)
TALVKN,
(SEQ ID NO: 1501)
TGWVQY,
(SEQ ID NO: 1502)
TLPVQT,
(SEQ ID NO: 1503)
TGLVQH,
(SEQ ID NO: 1504)
TPTVQN,
(SEQ ID NO: 1505)
TASVQK,
(SEQ ID NO: 1506)
TSPVQI,
(SEQ ID NO: 1507)
IGWVQN,
(SEQ ID NO: 1508)
TGWDKN,
(SEQ ID NO: 1509)
KSSVQN,
(SEQ ID NO: 1510)
TGYVQN,
(SEQ ID NO: 1511)
RGWVQT,
(SEQ ID NO: 1512)
RSLVQN,
(SEQ ID NO: 1513)
TGGVEN,
(SEQ ID NO: 1514)
TGCVRN,
(SEQ ID NO: 1516)
LSPVQS,
(SEQ ID NO: 1517)
TGPVQT,
(SEQ ID NO: 1518)
TVGVQK,
(SEQ ID NO: 1519)
TASGQN,
(SEQ ID NO: 1520)
SVSVQN,
(SEQ ID NO: 1521)
SGPVQT,
(SEQ ID NO: 1522)
VMSVKN,
(SEQ ID NO: 1523)
LGSVQK,
(SEQ ID NO: 1524)
TGLVLN,
(SEQ ID NO: 1525)
TSNVQN,
(SEQ ID NO: 1526)
TGWGHN,
(SEQ ID NO: 1527)
SQMVQN,
(SEQ ID NO: 1528)
TVSVHN,
(SEQ ID NO: 1529)
LSSVQT,
(SEQ ID NO: 1530)
TASVRN,
(SEQ ID NO: 1531)
VPAVQN,
(SEQ ID NO: 1532)
TGRVQK,
(SEQ ID NO: 1533)
AMSVQN,
(SEQ ID NO: 1534)
TAWVHN,
(SEQ ID NO: 1535)
TGLVRN,
(SEQ ID NO: 1536)
RTLVQT,
(SEQ ID NO: 1537)
TGSIQN,
(SEQ ID NO: 1538)
LSSVKN,
(SEQ ID NO: 1539)
TLQVQK,
(SEQ ID NO: 1540)
VGSVKN,
(SEQ ID NO: 1541)
LAPLQN,
(SEQ ID NO: 1542)
TPGVQN,
(SEQ ID NO: 1542)
LSAVQT,
(SEQ ID NO: 1543)
TGVVQN,
(SEQ ID NO: 1544)
VPQVQN,
(SEQ ID NO: 1545)
TGCVOK,
(SEQ ID NO: 1546)
TRWVQT,
(SEQ ID NO: 1547)
TGLDON,
(SEQ ID NO: 1548)
VSSVHN,
(SEQ ID NO: 1549)
KGWVQT,
(SEQ ID NO: 1550)
SLPVQN,
(SEQ ID NO: 1551)
TTSVHN,
(SEQ ID NO: 1552)
TVWVQN,
(SEQ ID NO: 1553)
TAQLQN,
(SEQ ID NO: 1554)
TRWVKN,
(SEQ ID NO: 1555)
TAWIQN,
(SEQ ID NO: 1556)
LSQVKN,
(SEQ ID NO: 1557)
TSTVKN,
(SEQ ID NO: 1558)
ALPVQN,
(SEQ ID NO: 1559)
TSMVQT,
(SEQ ID NO: 1560)
TSSVQH,
(SEQ ID NO: 1561)
TAMVKN,
(SEQ ID NO: 1562)
TPWVQN,
(SEQ ID NO: 1563)
TPRVQN,
(SEQ ID NO: 1564)
SSSVQN,
(SEQ ID NO: 1565)
RPPVQN,
(SEQ ID NO: 1566)
LAGVKN,
(SEQ ID NO: 1567)
TSPAQN,
(SEQ ID NO: 1568)
RSPVQT,
(SEQ ID NO: 1569)
TGWVPH,
(SEQ ID NO: 1570)
PGWGQN,
(SEQ ID NO: 1571)
IPPVQN,
(SEQ ID NO: 1572)
TGRVKN,
(SEQ ID NO: 1573)
TGRLQN,
(SEQ ID NO: 1574)
LSSVQH,
(SEQ ID NO: 1575)
AGWVQT,
(SEQ ID NO: 1576)
TGLVQS,
(SEQ ID NO: 1577)
TGCVQI,
(SEQ ID NO: 1578)
RPGVQN,
(SEQ ID NO: 1579)
TAAVQH,
(SEQ ID NO: 1580)
TGCDQN,
(SEQ ID NO: 1581)
TGRVRN,
(SEQ ID NO: 1582)
TGRDQN;
(ii)
(SEQ ID NO: 1192)
TTKVQN,
(SEQ ID NO: 1158)
TMKVQN,
(SEQ ID NO: 1207)
VAQVQN,
(SEQ ID NO: 3995)
TAWDQN,
(SEQ ID NO: 3698)
TGSVQH,
(SEQ ID NO: 1217)
VKQVQN,
(SEQ ID NO: 3868)
SAPVQN,
(SEQ ID NO: 3929)
LSKVQN,
(SEQ ID NO: 3905)
LAPVQN,
(SEQ ID NO: 3907)
LAQVQN,
(SEQ ID NO: 3985)
TAKVQN,
(SEQ ID NO: 3972)
SAKVQN,
(SEQ ID NO: 3999)
TGCFQN,
(SEQ ID NO: 1171)
TQKVQN,
(SEQ ID NO: 1197)
TVAVQN,
(SEQ ID NO: 3931)
LSPVQN,
(SEQ ID NO: 1195)
TTQVQN,
(SEQ ID NO: 3990)
TAQVQN,
(SEQ ID NO: 3951)
RIAVQN,
(SEQ ID NO: 3948)
RASVQN,
(SEQ ID NO: 1193)
TTPVQN,
(SEQ ID NO: 3867)
LTPVQN,
(SEQ ID NO: 3980)
STPVQN,
(SEQ ID NO: 3875)
TSPVQN,
(SEQ ID NO: 1161)
TMQVQN,
(SEQ ID NO: 1181)
TSKVQN,
(SEQ ID NO: 1237)
VSQVQN,
(SEQ ID NO: 3882)
VSPVQN,
(SEQ ID NO: 1200)
TVQVQN,
(SEQ ID NO: 1242)
VTAVQN,
(SEQ ID NO: 3958)
RQPVQN,
(SEQ ID NO: 3898)
ISGVQN,
(SEQ ID NO: 1232)
VRPVQN,
(SEQ ID NO: 3911)
LGPVQN,
(SEQ ID NO: 1167)
TNQVQN,
(SEQ ID NO: 1229)
VQQVQN,
(SEQ ID NO: 1206)
VANVQN,
(SEQ ID NO: 3884)
AAPVQN,
(SEQ ID NO: 3964)
RSTVQN,
(SEQ ID NO: 1156)
TMAVQN,
(SEQ ID NO: 3896)
IQPVQN,
(SEQ ID NO: 3892)
IASVQN,
(SEQ ID NO: 3881)
TVSVQN,
(SEQ ID NO: 3950)
RGSVQN,
(SEQ ID NO: 3942)
NSPVQN,
(SEQ ID NO: 3925)
LQPVQN,
(SEQ ID NO: 1243)
VTGVQN,
(SEQ ID NO: 1221)
VMQVQN,
(SEQ ID NO: 3976)
SMAVQN,
(SEQ ID NO: 1211)
VGKVQN,
(SEQ ID NO: 3897)
IQSVQN,
(SEQ ID NO: 3888)
CSPVQN,
(SEQ ID NO: 3927)
LQRVQN,
(SEQ ID NO: 3996)
TAWVQH,
(SEQ ID NO: 1169)
TPPVQN,
(SEQ ID NO: 1244)
VTKVQN,
(SEQ ID NO: 3869)
SSPVQN,
(SEQ ID NO: 3885)
AGPVQN,
(SEQ ID NO: 3908)
LARVQN,
(SEQ ID NO: 1196)
TTTVQN,
(SEQ ID NO: 3673)
TGGFQN,
(SEQ ID NO: 1155)
TLQVQN,
(SEQ ID NO: 1163)
TMSVQN,
(SEQ ID NO: 1205)
VAKVQN,
(SEQ ID NO: 3946)
RAAVQN,
(SEQ ID NO: 1199)
TVGVQN,
(SEQ ID NO: 3924)
LNPVQN,
(SEQ ID NO: 3932)
LSQVQN,
(SEQ ID NO: 1151)
TKPVQN,
(SEQ ID NO: 1166)
TNAVQN,
(SEQ ID NO: 3910)
LATVQN,
(SEQ ID NO: 1245)
VTPVQN,
(SEQ ID NO: 1226)
VQAVQN,
(SEQ ID NO: 3874)
TTSVQN,
(SEQ ID NO: 3889)
CTPVQN,
(SEQ ID NO: 3984)
TAGVQN,
(SEQ ID NO: 1185)
TSQVQN,
(SEQ ID NO: 1159)
TMNVQN,
(SEQ ID NO: 1188)
TSTVQN,
(SEQ ID NO: 1216)
VKPVQN,
(SEQ ID NO: 3886)
ASPVQN,
(SEQ ID NO: 1203)
VAAVQN,
(SEQ ID NO: 3915)
LKSVQN,
(SEQ ID NO: 3890)
IAAVQN,
(SEQ ID NO: 3983)
TAAVQN,
(SEQ ID NO: 1150)
TKAVQN,
(SEQ ID NO: 1139)
TGSVQS,
(SEQ ID NO: 1235)
VSNVQN,
(SEQ ID NO: 3988)
TAPVQN,
(SEQ ID NO: 3921)
LMPVQN,
(SEQ ID NO: 3914)
LHPVQN,
(SEQ ID NO: 3947)
RAQVQN,
(SEQ ID NO: 3936)
LTNVQN,
(SEQ ID NO: 3969)
RTTVQN,
(SEQ ID NO: 1189)
TSVVQN,
(SEQ ID NO: 3956)
RMSVQN,
(SEQ ID NO: 1212)
VGNVQN,
(SEQ ID NO: 3922)
LMQVQN,
(SEQ ID NO: 3993)
TATVQN,
(SEQ ID NO: 1214)
VHPVQN,
(SEQ ID NO: 1236)
VSPVQT,
(SEQ ID NO: 3900)
ISSVQN,
(SEQ ID NO: 1208)
VASVQN,
(SEQ ID NO: 1177)
TRWDQN,
(SEQ ID NO: 1165)
TMTVQN,
(SEQ ID NO: 3963)
RSSVQN,
(SEQ ID NO: 3877)
TAWVQN,
(SEQ ID NO: 3966)
RTGVQN,
(SEQ ID NO: 1209)
VATVQN,
(SEQ ID NO: 1246)
VTSVQN,
(SEQ ID NO: 3883)
VSSVQN,
(SEQ ID NO: 1168)
TNSVQN,
(SEQ ID NO: 1215)
VKAVQN,
(SEQ ID NO: 3975)
SGPVQN,
(SEQ ID NO: 3696)
TGPVQN,
(SEQ ID NO: 3986)
TAMVQN,
(SEQ ID NO: 1174)
TQPVQN,
(SEQ ID NO: 1175)
TQQVQN,
(SEQ ID NO: 1238)
VSRVQN,
(SEQ ID NO: 1147)
TGWVQP,
(SEQ ID NO: 1233)
VSAVQN,
(SEQ ID NO: 1219)
VLSVQN,
(SEQ ID NO: 1170)
TQHVQN,
(SEQ ID NO: 3909)
LASVQN,
(SEQ ID NO: 3945)
QAPVQN,
(SEQ ID NO: 3939)
NAQVQN,
(SEQ ID NO: 3887)
ATPVQN,
(SEQ ID NO: 1228)
VQPVQN,
(SEQ ID NO: 1190)
TTAVQN,
(SEQ ID NO: 1149)
TGWVRN,
(SEQ ID NO: 3866)
LAAVQN,
(SEQ ID NO: 1184)
TSPDQN,
(SEQ ID NO: 3960)
RSGVQN,
(SEQ ID NO: 3677)
TGGVQT,
(SEQ ID NO: 1145)
TGWVPN,
(SEQ ID NO: 1194)
TTPVQT,
(SEQ ID NO: 3916)
LMAVQN,
(SEQ ID NO: 1160)
TMPVQN,
(SEQ ID NO: 3904)
LANVQN,
(SEQ ID NO: 1241)
VSTVQN,
(SEQ ID NO: 3974)
SAQVQN,
(SEQ ID NO: 3943)
NTPVQN,
(SEQ ID NO: 1240)
VSSVQT,
(SEQ ID NO: 1201)
TVSVKN,
(SEQ ID NO: 1247)
TGLVQN,
(SEQ ID NO: 3879)
TGSVQN,
(SEQ ID NO: 3672)
TGGAQN,
(SEQ ID NO: 3994)
TAVVQN,
(SEQ ID NO: 3954)
RLGVQN,
(SEQ ID NO: 3967)
RTLVQN,
(SEQ ID NO: 1172)
TQMVQN,
(SEQ ID NO: 3901)
ITPVQN,
(SEQ ID NO: 1202)
TVWVQK,
(SEQ ID NO: 3959)
RSAVQN,
(SEQ ID NO: 3991)
TASVQN,
(SEQ ID NO: 1157)
TMGVQN,
(SEQ ID NO: 3675)
TGGVQH,
(SEQ ID NO: 1230)
VQSVQN,
(SEQ ID NO: 3878)
TGGVQN,
(SEQ ID NO: 3899)
ISPVQN,
(SEQ ID NO: 1248)
TGWVKN,
(SEQ ID NO: 3697)
TGSAQN,
(SEQ ID NO: 3871)
TGWAQN,
(SEQ ID NO: 1164)
TMSVQT,
(SEQ ID NO: 1210)
VGGVQN,
(SEQ ID NO: 3906)
LAPVQT,
(SEQ ID NO: 3876)
TALVQN,
(SEQ ID NO: 3902)
LAGVQN,
(SEQ ID NO: 3965)
RTAVQN,
(SEQ ID NO: 3961)
RSPVQN,
(SEQ ID NO: 3873)
TLAVQN,
(SEQ ID NO: 3903)
LAHVQN,
(SEQ ID NO: 1182)
TSLVQN,
(SEQ ID NO: 3955)
RLSVQN,
(SEQ ID NO: 3978)
LMGVQN,SMQVQN,
(SEQ ID NO: 1176)
TQTVQN,
(SEQ ID NO: 1142)
TGWEQN,
(SEQ ID NO: 1213)
VGSVQN,
(SEQ ID NO: 1234)
VSGVQN,
(SEQ ID NO: 1220)
VMAVQN,
(SEQ ID NO: 3893)
IGGVQN,
(SEQ ID NO: 3891)
IAGVQN,
(SEQ ID NO: 3870)
TGRVQN,
(SEQ ID NO: 3928)
LSHVQN,
(SEQ ID NO: 1231)
VQTVQN,
(SEQ ID NO: 3880)
TGWDQN,
(SEQ ID NO: 3957)
RNSVQN,
(SEQ ID NO: 1154)
TLPVQN,
(SEQ ID NO: 1152)
TKQVQN,
(SEQ ID NO: 3912)
LGQVQN,
(SEQ ID NO: 3941)
NMQVQN,
(SEQ ID NO: 3944)
NVQVQN,
(SEQ ID NO: 3699)
TGSVQI,
(SEQ ID NO: 3949)
RGGVQN,
(SEQ ID NO: 1222)
VMSVQN,
(SEQ ID NO: 1191)
TTGVQN,
(SEQ ID NO: 3930)
LSPVQK,
(SEQ ID NO: 3933)
LSRVQN,
(SEQ ID NO: 1239)
VSSVQK,
(SEQ ID NO: 3989)
TAPVQT,
(SEQ ID NO: 3938)
MAPVQN,
(SEQ ID NO: 3895)
ILGVQN,
(SEQ ID NO: 3992)
TASVQT,
(SEQ ID NO: 3697)
TGSLQN,
(SEQ ID NO: 1141)
TGTVQN,
(SEQ ID NO: 1140)
TGSVQT,
(SEQ ID NO: 1187)
TSSVQT,
(SEQ ID NO: 1180)
TSHVQN,
(SEQ ID NO: 3952)
RIGVQN,
(SEQ ID NO: 1144)
TGWGQT,
(SEQ ID NO: 3973)
SAMVQN,
(SEQ ID NO: 1183)
TSMVQN,
(SEQ ID NO: 3977)
SMGVQN,
(SEQ ID NO: 3979)
SMSVQN,
(SEQ ID NO: 1186)
TSSVQN,
(SEQ ID NO: 1179)
TSGVQN,
(SEQ ID NO: 3998)
TGAVQN,
(SEQ ID NO: 1225)
VNSVQN,
(SEQ ID NO: 1204)
VAGVQN,
(SEQ ID NO: 3894)
IGSVQN,
(SEQ ID NO: 3913)
LGSVQN,
(SEQ ID NO: 1224)
VNGVQN,
(SEQ ID NO: 3935)
LTAVQN,
(SEQ ID NO: 1227)
VQNVQN,
(SEQ ID NO: 1153)
TKSVQN,
(SEQ ID NO: 3982)
SVGVQN,
(SEQ ID NO: 3997)
TAWVQT,
(SEQ ID NO: 3940)
NASVQN,
(SEQ ID NO: 1178)
TSAVQN,
(SEQ ID NO: 1162)
TMSVKN,
(SEQ ID NO: 3987)
TANVQN,
(SEQ ID NO: 1143)
TGWFQN,
(SEQ ID NO: 3674)
TGGVLN,
(SEQ ID NO: 3937)
LTSVQN,
(SEQ ID NO: 1148)
TGWVQT,
(SEQ ID NO: 3962)
RSQVQN,
(SEQ ID NO: 3953)
RIPVQN,
(SEQ ID NO: 1146)
TGWVQD,
(SEQ ID NO: 3970)
RVEVQN,
(SEQ ID NO: 1218)
VLPVQN,
(SEQ ID NO: 3676)
TGGVQK,
(SEQ ID NO: 3981)
SVAVQN,
(SEQ ID NO: 3926)
LQQVQN,
(SEQ ID NO: 3934)
LSTVQN,
(SEQ ID NO: 3971)
SAAVQN,
(SEQ ID NO: 3968)
RTSVQN,
(SEQ ID NO: 1173)
TQNVQN,
(SEQ ID NO: 1223)
VNAVQN,
(SEQ ID NO: 1198)
TVAVQT,
(SEQ ID NO: 3923)
LMSVQN,
TGWVQN;

[0461] (iii) amino acid sequence comprising any portion of an amino acid sequence in (i) or (ii), e.g., any 2, 3, 4, or 5 amino acids, e.g., consecutive amino acids, thereof;
[0462] (iv) an amino acid sequence comprising at least one, two, or three but no more than four modifications, e.g., substitutions (e.g., conservative substitutions), insertions, or deletions, relative to any of the amino acid sequences in (i) or (ii); or
[0463] (v) an amino acid sequence comprising at least one, two, or three but no more than four different amino acids, relative to any one of the amino acid sequences in (i) or (ii).
[0464] 181. The isolated AAV particle of any one of embodiments 170-180, wherein [D][E] is or comprises TGWVQN (SEQ ID NO: 3865), TGWVPN (SEQ ID NO: 1145), or LSPVKN (SEQ ID NO: 1404).
[0465] 182. The isolated AAV particle of any one of embodiments 170-181, wherein:
   [0466] (i) [B] is or comprises: VHLY (SEQ ID NO: 3741), VHHY (SEQ ID NO: 3747), VHIY (SEQ ID NO: 3746), VNLY (SEQ ID NO: 3744), VQLY (SEQ ID NO: 3751), IHLY (SEQ ID NO: 3752), LHLY (SEQ ID NO: 3749), VPLY(SEQ ID NO: 3743), VDLY (SEQ ID NO: 3753), AHLY (SEQ ID NO: 3754), VHRY (SEQ ID NO: 3745), FHLY (SEQ ID NO: 3748), DHLY (SEQ ID NO: 3750), VLLY (SEQ ID NO: 3755), GHLY (SEQ ID NO: 3756), VRLY (SEQ ID NO: 3757), VHVY(SEQ ID NO: 3742), or VYLY (SEQ ID NO: 3758);
   [0467] (ii) [C] is or comprises: AQAQ (SEQ ID NO: 3759), AQPQ (SEQ ID NO: 3761), AKAQ (SEQ ID NO: 3763), DQAQ (SEQ ID NO: 3766), SQAQ (SEQ ID NO: 3760), AHAQ (SEQ ID NO: 3764), AQEQ (SEQ ID NO: 3770), AQAK (SEQ ID NO: 3768), ALAQ (SEQ ID NO: 3771), APAQ (SEQ ID NO: 3767), ARAQ SEQ ID NO: 3772), AQAH (SEQ ID NO: 3769), AQAP (SEQ ID NO: 3765), or TQAQ (SEQ ID NO: 3773);
   [0468] (iii) [D] is or comprises: TTK, TMK, VAQ, TAW, TGS, VKQ, SAP, LSK, LAP, LAQ, TAK, SAK, TGC, TQK, TVA, LSP, TTQ, TAQ, RIA, RAS, TTP, LTP, STP, TSP, TMQ, TSK, VSQ, VSP, TVQ, VTA, RQP, ISG, VRP, LGP, TNQ, VQQ, VAN, AAP, RST, TMA, IQP, IAS, TVS, RGS, NSP, LQP, VTG, VMQ, SMA, VGK, IQS, CSP, LQR, TPP, VTK, SSP, AGP, LAR, TTT, TGG, TLQ, TMS, VAK, RAA, TVG, LNP, LSQ, TKP, TNA, LAT, VTP, VQA, TTS, CTP, TAG, TSQ, TMN, TST, VKP, ASP, VAA, LKS, IAA, TAA, TKA, VSN, TAP, LMP, LHP, RAQ, LTN, RTT, TSV, RMS, VGN, LMQ, TAT, VHP, ISS, VAS, TRW, TMT, RSS, RTG, VAT, VTS, VSS, TNS, VKA, SGP, TGP, TAM, TQP, TQQ, VSR, TGW, VSA, VLS, TQH, LAS, QAP, NAQ, ATP, VQP, TTA, LAA, RSG, LMA, TMP, LAN, VST, SAQ, NTP, TGL, TAV, RLG, RTL, TQM, ITP, TVW, RSA, TAS, TMG, VQS, ISP, VGG, TAL, LAG, RTA, RSP, TLA, LAH, TSL, RLS, LMG, SMQ, TQT, VGS, VSG, VMA, IGG, IAG, TGR, LSH, VQT, RNS, TLP, TKQ, LGQ, NMQ, NVQ, RGG, VMS, TTG, LSR, MAP, ILG, TGT, TSS, TSH, RIG, SAM, TSM, SMG, SMS, TSG, TGA, VNS, VAG, IGS, LGS, VNG, LTA, VQN, TKS, SVG, NAS, TSA, TAN, LTS, RSQ, RIP, RVE, VLP, SVA, LQQ, LST, SAA, RTS, TQN, VNA, LMS, TMM, RSV, TQL, RTP, RQQ, VQG, PGW, STQ, QSP, RYS, TQR, SAG, RQS, SQP, STS, VLG, NQP, LGT, RAG, TGM, LSN, RLP, RQG, RLT, TLR, SAF, SVQ, LLP, RTQ, LPP, AQP, TPQ, TSW, NTT, TTR, TQW, NTQ, TYA, TLS, NLP, ATS, ATQ, LSS, TQA, VMP, NAL, RML, RQL, TLG, TGF, SAL, SQL, LSA, TGQ, TNG, AAA, SAV, LSG, SSR, SPP, LVG, TPA, KGW, VPP, ATG, SAN, SQQ, SSM, AVG, VAP, TPS, RGW, SSL, TYS, TPT, IGW, KSS, TGY, RSL, SVS, TSN, SQM, VPA, AMS, TPG, TGV, VPQ, SLP, ALP, TPW, TPR, SSS, RPP, IPP, AGW, or RPG; and/or
   [0469] (iv) [E] is or comprises: VQN, DQN, VQH, FQN, VQS, VQT, VQP, VRN, VPN, VKN, AQN, VQK, EQN, VQI, LQN, GQT, VLN, VQD, VHN, GQN, VKT, VKK, FQK, VEN, VQY, DKN, GHN, IQN, or VPH.
[0470] 183. The isolated AAV particle of any one of embodiments 170-182, wherein:
   [0471] (i) [B] is or comprises: VHLY (SEQ ID NO: 3741), VHHY (SEQ ID NO: 3747), or VHIY (SEQ ID NO: 3746);
   [0472] (ii) [C] is or comprises: AQAQ (SEQ ID NO: 3759), AQPQ (SEQ ID NO: 3761), AKAQ (SEQ ID NO: 3763), DQAQ (SEQ ID NO: 3766), or SQAQ (SEQ ID NO: 3760);
   [0473] (iii) [D] is or comprises: TTK, TMK, VAQ, TAW, TGS, VKQ, SAP, LSK, LAP, LAQ, TAK, SAK, TGC, TQK, TVA, LSP, TTQ, TAQ, RIA, RAS, TTP, LTP, STP, TSP, TMQ, TSK, VSQ, VSP, TVQ, VTA, RQP, ISG, VRP, LGP, TNQ, VQQ, VAN, AAP, RST, TMA, IQP, IAS, TVS, RGS, NSP, LQP, VTG, VMQ, SMA, VGK, IQS, CSP, LQR, TPP, VTK, SSP, AGP, LAR, TTT, TGG, TLQ, TMS, VAK, RAA, TVG, LNP, LSQ, TKP, TNA, LAT, VTP, VQA, TTS, CTP, TAG, TSQ, TMN, TST, VKP, ASP, VAA, LKS, IAA, TAA, TKA, VSN, TAP, LMP, LHP, RAQ, LTN, RTT, TSV, RMS, VGN, LMQ, TAT, VHP, ISS, VAS, TRW, TMT, RSS, RTG, VAT, VTS, VSS, TNS, VKA, SGP, TGP, TAM, TQP, TQQ, VSR, TGW, VSA, VLS, TQH, LAS, QAP, NAQ, ATP, VQP, TTA, LAA, RSG, LMA, TMP, LAN, VST, SAQ, NTP, TGL, TAV, RLG, RTL, TQM, ITP, TVW, RSA, TAS, TMG, VQS, ISP, VGG, TAL, LAG, RTA, RSP, TLA, LAH, TSL, RLS, LMG, SMQ, TQT, VGS, VSG, VMA, IGG, IAG, TGR, LSH, VQT, RNS, TLP, TKQ, LGQ, NMQ, NVQ, RGG, VMS, TTG, LSR, MAP, ILG, TGT, TSS, TSH, RIG, SAM, TSM, SMG, SMS, TSG, TGA, VNS, VAG, IGS, LGS, VNG, LTA, VQN, TKS, SVG, NAS, TSA, TAN, LTS, RSQ, RIP, RVE, VLP, SVA, LQQ, LST, SAA, RTS, TQN, VNA, or LMS; and/or
   [0474] (iv) [E] is or comprises: VQN, DQN, VQH, FQN, VQS, VQT, VQP, VRN, VPN, VKN, AQN, VQK, EQN, VQI, LQN, GQT, VLN, or VQD.
[0475] 184. The isolated AAV particle of any one of embodiments 170-183, wherein [A][B][C][D][E] comprises:
   [0476] (i) the amino acid sequence of any of SEQ ID NOs: 143, 148, 149, 151, 153, 154-158, 160-163, 166, 168, 170, 171, 173-175, 177-179, 181, 182, 184-188, 191-197, 199-210, 212-215, 217-225, 227-231, 233, 234, 236-240, 243-262, 265, 267, 268, 270-277, 279, 282, 284-286, 288-293, 295, 296, 298, 300-314, 316-327, 329, 331, 332, 334, 336, 337-344, 346-350, 352-354, 356-365, 367, 369, 371-380, 382-385, 387, 392-394, 396, 397, 399-401, 404-411, 413-415, 417, 419-429, 432, 433, 435-437, 438, 440-442, 444-447, 450-454, 456, 458-461, 464, 465, 467-469, 471-484, 487-495, 497, 498, 500-503, 505, 507-512, 514-517, 522-525, 528-539, 542-545, 547, 551-555, 558-561, 563-568, 570, 573, 574, 576, 579, 581, 582, 584, 586, 587, 591-596, 598, 601, 604, 605, 606, 607, 610, 612, 614-619, 624-629, 631-636, 640, 641, 645, 646, 649, 650, 656, 658, 661, 663, 664, 666, 668, 669, 670, 672, 673, 674, 675, 677, 679, 683, 684, 686, 688, 689, 691, 693, 695, 696, 697, 699, 700, 701, 702, 704-706, 709-714, 720, 722, 725-731, 733, 736, 740, 745, 749-752, 754, 755, 757, 758, 760-765, 767, 768, 770, 771, 773, 778-780, 783-788, 792-794, 797-799, 801, 802, 804-806, 812, 814, 815, 817, 818, 820, 821, 824, 828, 831, 832, 834-837, 839, 840-845, 847, 848, 850-855, 857-859, 861, 862, 865, 866, 869-872, 874-876, 882-884, 887, 889-895, 897, 899, 901, 903-905, 907, 908, 910, 911, 913, 915, 919, 920, 923, 924, 926, 927, 929, 931-933, 935, 937, 939-949, 952-955, 957, 958, 960, 962, 964, 965, 967, 971, 973, 974, 976, 977, 981, 985-989, 992, 994, 997-1000, 1002, 1004, 1006-1008, 1010, 1013, 1015, 1017, 1018, 1020, 1021, 1023-1025, 1027, 1029-1031, 1033-1035, 1037-1040, 1043, 1046, 1049, 1052, 1053, 1056, 1057, 1059, 1062, 1064, 1065, 1067, 1068, 1070, 1073, 1075, 1077-1080, 1083-1087, 1089, 1090, 1093, 1094, 1097, 1100, 1101, 1103, 1105-1107, 1110-1112, 1114-1117, 1119, 1121, 1125, 1126, 1129, 1132, 1133, 1135;
   [0477] (ii) an amino acid sequence comprising any portion of an amino acid sequence in (i), e.g., any 2, 3, 4, 5, 6, 7, 8, 9, 10, 11, 12, 13, 14, 15, 16, 17, or 18 amino acids, e.g., consecutive amino acids, thereof;
   [0478] (iii) an amino acid sequence comprising at least one, two, or three but no more than four modifications, e.g., substitutions (e.g., conservative substitutions), insertions, or deletions, relative to any of the amino acid sequences in (i); or
   [0479] (iv) an amino acid sequence comprising at least one, two, or three but no more than four different amino acids, relative to any one of the amino acid sequences in (i).
[0480] 185. The isolated AAV particle of any one of embodiments 170-184, wherein [A][B][C][D][E] comprises:
   [0481] (i) the amino acid sequence of any of SEQ ID NOs: 139, 143, 148, 149, 151, 153-158, 160-163, 166, 168, 170, 171, 173-175, 177-179, 181, 182, 184-188, 191-197, 199, 200, 201-210, 212-215, 217-225, 227-231, 233, 234, 236-240, 243-262, 265, 267, 268, 270-277, 279, 282, 284-286, 288-293, 295, 296, 298, 300-314, 316-327, 329, 331, 332, 334, 336, 337-344, 346-350, 352-354, 356-365, 367, 369, 371-380, 382-385, 387, 392-394, 396, 397, 399-401, 404, 405, 406-411, 413-415, 417, 419-429, 432, 433, 435-438, 440-442, 444-447, 450-454, 456, 458-461, 464, 465, 467-469, or 471-476;
   [0482] (ii) an amino acid sequence comprising any portion of an amino acid sequence in (i), e.g., any 2, 3, 4, 5, 6, 7, 8, 9, 10, 11, 12, 13, 14, 15, 16, 17, or 18 amino acids, e.g., consecutive amino acids, thereof;
   [0483] (iii) an amino acid sequence comprising at least one, two, or three but no more than four modifications, e.g., substitutions (e.g., conservative substitutions), insertions, or deletions, relative to any of the amino acid sequences in (i); or
   [0484] (iv) an amino acid sequence comprising at least one, two, or three but no more than four different amino acids, relative to any one of the amino acid sequences in (i).
[0485] 186. The isolated AAV particle of any one of embodiments 170-185, wherein [A][B][C][D][E] comprises the amino acid sequence of PLNGAVHLYAQAQTGWVPN (SEQ ID NO: 314).
[0486] 187. The isolated AAV particle of any one of embodiments 170-185, wherein [A][B][C][D][E] comprises the amino acid sequence of PLNGAVHLYAQAQLSPVKN (SEQ ID NO: 566).
[0487] 188. The isolated AAV particle of any one of embodiments 170-185, wherein [A][B][C][D][E] comprises the amino acid sequence the amino acid sequence of PLNGAVHLYAQAQTGWVQN (SEQ ID NO: 476).
[0488] 189. The isolated AAV particle of any one of embodiments 131-188, wherein [A][B] is present in loop VIII.
[0489] 190. The isolated AAV particle of any one of embodiments 170-189, wherein [C], [D], and/or [E] is present in loop VIII.
[0490] 191. The isolated AAV particle of any one of embodiments 170-190, wherein [A][B][C][D][E] is present in loop VIII.
[0491] 192. The isolated AAV particle of any one of embodiments 131-191, which comprises an amino acid other than A at position 587 and/or an amino acid other than Q at position 588, numbered according to SEQ ID NO: 138.
[0492] 193. The isolated AAV particle of any one of embodiments 131-192, which comprises:
   [0493] (i) the amino acid P at position 587, numbered according to SEQ ID NO: 5, 8, 138, or 3636; and/or
   [0494] (ii) the amino acid L at position 588, numbered according to SEQ ID NO: 5, 8, 138, or 3636.
[0495] 194. The isolated AAV particle of any one of embodiments 131-193, wherein [A] is present immediately subsequent to position 586, relative to a reference sequence numbered according to the amino acid sequence of SEQ ID NO: 5, 8, 138 or 3636.
[0496] 195. The isolated AAV particle of any one of embodiments 131-194, wherein [A] is present immediately subsequent to position 586, and replaces positions 587 and 588 (e.g., A587 and Q588), numbered according to SEQ ID NO: 138.
[0497] 196. The isolated AAV particle of any one of embodiments 131-195, wherein [A] replaces positions 587 and 588 (e.g., A587 and Q588), numbered according to SEQ ID NO: 138.
[0498] 197. The isolated AAV particle of any one of embodiments 131-196, wherein [A] corresponds to positions 587-591 of SEQ ID NO: 5, 8, or 3636.
[0499] 198. The isolated AAV particle of any one of embodiments 131-197, wherein [B] is present immediately subsequent to [A].
[0500] 199. The isolated AAV particle of any one of embodiments 131-198, wherein [B] is present immediately subsequent to [A], wherein [A] is present immediately subsequent to position 586, relative to a reference sequence numbered according to the amino acid sequence of SEQ ID NO: 5, 8, 138 or 3636.
[0501] 200. The isolated AAV particle of any one of embodiments 131-199, wherein [B] is present immediately subsequent to [A], wherein [A] is present immediately subsequent to position 586 and replaces positions 587 and 588 (e.g., A587 and Q588), numbered according to SEQ ID NO: 138.
[0502] 201. The isolated AAV particle of any one of embodiments 131-200, wherein [B] corresponds to positions 592 to 595 of SEQ ID NO: 5, 8, or 3636.
[0503] 202. The isolated AAV particle of any one of embodiments 131-201, wherein [A][B] replaces positions 587 and 588 (e.g., A587 and Q588), numbered according to SEQ ID NO: 138.
[0504] 203. The isolated AAV particle of any one of embodiments 131-202, wherein [A][B] is present immediately subsequent to position 586, numbered according to SEQ ID NO: 138.
[0505] 204. The isolated AAV particle of any one of embodiments 131-203, wherein [A][B] is present immediately subsequent to position 586 and replaces positions 587 and 588 (e.g., A587 and Q588), numbered according to SEQ ID NO: 138.
[0506] 205 The isolated AAV particle of any one of embodiments 131-204, wherein [A][B] corresponds to positions 587-595 of SEQ ID NO: 5, 8, or 3636.
[0507] 206. The isolated AAV particle of any one of embodiments 143-204, wherein [C] is present immediately subsequent to position 588, relative to a reference sequence numbered according to the amino acid sequence of SEQ ID NO: 5, 8, 138 or 3636.
[0508] 207. The isolated AAV particle of any one of embodiments 143-206, wherein [C] replaces positions 589-592 (e.g., A589, Q590, A591, Q592), numbered according to the amino acid sequence of SEQ ID NO: 138.
[0509] 208. The isolated AAV particle of any one of embodiments 143-207, wherein [C] is present immediately subsequent to position 588, and replaces positions 589-592 (e.g., A589, Q590, A591, Q592), numbered according to the amino acid sequence of SEQ ID NO: 138.
[0510] 209. The isolated AAV particle of any one of embodiments 143-208, wherein [C] corresponds to positions 596-599 of SEQ ID NO: 5, 8, or 3636.
[0511] 210. The isolated AAV particle of any one of embodiments 143-209, wherein [A][B][C] is present immediately subsequent to position 586, numbered according to SEQ ID NO: 138.
[0512] 211. The isolated AAV particle of any one of embodiments 143-210, wherein [A][B][C] replaces positions 587-592 (e.g., A587, Q588, A589, Q590, A591, Q592), numbered according to SEQ ID NO: 138.
[0513] 212. The isolated AAV particle of any one of embodiments 143-211, wherein [A][B][C] is present immediately subsequent to position 586 and replaces positions 587-592 (e.g., A587, Q588, A589, Q590, A591, Q592), numbered according to SEQ ID NO: 138.
[0514] 213. The isolated AAV particle of any one of embodiments 143-212, wherein [A][B][C] corresponds to positions 587-599 of SEQ ID NO: 5, 8, or 3636.
[0515] 214. The isolated AAV particle of any one of embodiments 159-213, wherein [D] is present immediately subsequent to position 592, relative to a reference sequence numbered according to the amino acid sequence of SEQ ID NO: 5, 8, 138 or 3636.
[0516] 215. The isolated AAV particle of any one of embodiments 159-214, wherein [D] replaces positions 593-595 (e.g., T593, G594, W595), numbered according to the amino acid sequence of SEQ ID NO: 138.
[0517] 216. The isolated AAV particle of any one of embodiments 159-215, wherein [D] is present immediately subsequent to position 592, and replaces positions 593-595 (e.g., T593, G594, W595), numbered according to the amino acid sequence of SEQ ID NO: 138.
[0518] 217. The isolated AAV particle of any one of embodiments 159-216, wherein [D] corresponds to positions 600-602 of SEQ ID NO: 5, 8, or 3636.
[0519] 218. The isolated AAV particle of any one of embodiments 159-217, wherein [C][D] is present immediately subsequent to position 588, numbered according to SEQ ID NO: 138.
[0520] 219. The isolated AAV particle of any one of embodiments 159-218, wherein [C][D] replaces positions 589-595 (e.g., A589, Q590, A591, Q592, T593, G594, W595), numbered according to the amino acid sequence of SEQ ID NO: 138.
[0521] 220. The isolated AAV particle of any one of embodiments 159-219, wherein [C][D] is present immediately subsequent to 588, and replaces positions 589-595 (e.g., A589, Q590, A591, Q592, T593, G594, W595), numbered according to the amino acid sequence of SEQ ID NO: 138.
[0522] 221. The isolated AAV particle of any one of embodiments 159-220, wherein [C][D] corresponds to positions 596-602 of SEQ ID NO: 5, 8, or 3636.
[0523] 222. The isolated AAV particle of any one of embodiments 159-221, wherein [A][B][C][D] is present immediately subsequent to position 586, numbered according to SEQ ID NO: 5, 8, 138, or 3636.
[0524] 223. The isolated AAV particle of any one of embodiments 159-222, wherein [A][B][C][D] replaces positions 587-595 (e.g., A587, Q588, A589, Q590, A591, Q592, T593, G594, W595), numbered according to SEQ ID NO: 138.
[0525] 224. The isolated AAV particle of any one of embodiments 159-223, wherein [A][B][C][D] is present immediately subsequent to position 586 and replaces positions 587-595 (e.g., A587, Q588, A589, Q590, A591, Q592, T593, G594, W595), numbered according to SEQ ID NO: 138.
[0526] 225. The isolated AAV particle of any one of embodiments 159-224, wherein [A][B][C][D] corresponds to positions 587-602 of SEQ ID NO: 5, 8, or 3636.
[0527] 226. The isolated AAV particle of any one of embodiments 170-225, wherein [E] is present immediately subsequent to position 595, relative to a reference sequence numbered according to the amino acid sequence of SEQ ID NO: 5, 8, 138 or 3636.
[0528] 227. The isolated AAV particle of any one of embodiments 170-226, wherein [E] replaces positions 596-598 (e.g., V596, Q597, N598), numbered according to the amino acid sequence of SEQ ID NO: 138.
[0529] 228. The isolated AAV particle of any one of embodiments 170-227, wherein [E] is present immediately subsequent to position 595, and replaces positions 596-598 (e.g., V596, Q597, N598), numbered according to the amino acid sequence of SEQ ID NO: 138.
[0530] 229. The isolated AAV particle of any one of embodiments 170-228, wherein [E] corresponds to positions 603 to 605 of SEQ ID NO: 5, 8, or 3636.
[0531] 230. The isolated AAV particle of any one of embodiments 170-229, wherein [A][B][C][D][E] is present immediately subsequent to position 586, according to the amino acid sequence of SEQ ID NO: 5, 8, 138 or 3636.
[0532] 231. The isolated AAV particle of any one of embodiments 170-230, wherein [A][B][C][D][E] replaces positions 587-598 (e.g., A587, Q588, A589, Q590, A591, Q592, T593, G594, W595, V596, Q597, N598), numbered according to SEQ ID NO: 138.
[0533] 232. The isolated AAV particle of any one of embodiments 170-231, wherein [A][B][C][D][E] is present immediately subsequent to position 586 and replaces positions 587-598 (e.g., A587, Q588, A589, Q590, A591, Q592, T593, G594, W595, V596, Q597, N598), numbered according to SEQ ID NO: 138.
[0534] 233. The isolated AAV particle of any one of embodiments 170-232, wherein [A][B][C][D][E] corresponds to positions 587-605 of SEQ ID NO: 5, 8, or 3636.
[0535] 234. The isolated AAV particle of any one of embodiments 131-233, wherein the AAV capsid variant comprises from N-terminus to C-terminus, [A][B].
[0536] 235. The isolated AAV particle of any one of embodiments 143-234, wherein the AAV capsid variant comprises from N-terminus to C-terminus, [A][B][C].
[0537] 236. The isolated AAV particle of any one of embodiments 159-235, wherein the AAV capsid variant comprises from N-terminus to C-terminus, [A][B][C][D].
[0538] 237. The isolated AAV particle of any one of embodiments 170-236, wherein the AAV capsid variant comprises from N-terminus to C-terminus, [A][B][C][D][E].
[0539] 238. An isolated, e.g., recombinant, AAV particle comprising an AAV capsid variant and a nucleic acid comprising a transgene encoding a SOD1 targeting polynucleotide (e.g., a SOD1 targeting RNAi), wherein the AAV capsid variant comprises PLNGAVHLY (SEQ ID NO: 3648) and optionally wherein the AAV capsid variant further comprises one, two, or all of an amino acid other than T at position 593 (e.g., A, L, R, V, C, I, K, M, N, P, Q, S), an amino acid other than G at position 594 (e.g., M, S, A, Q, V, T, L, P, H, K, N, I, Y, or R), and/or an amino acid other than W at position 595 (e.g., S, P, T, A, G, L, Q, H, N, R, K, V, E, F, M, C, or Y), relative to a reference sequence numbered according to the amino acid sequence of SEQ ID NO: 138.
[0540] 239. The isolated AAV particle of embodiment 238, wherein:
   [0541] (i) the amino acid at position 593, relative to a reference sequence numbered according to the amino acid sequence of SEQ ID NO: 138, is: T, A, L, R, V, C, I, K, M, N, P, Q, or S;
   [0542] (ii) the amino acid at position 594, relative to a reference sequence numbered according to the amino acid sequence of SEQ ID NO: 138, is: G, M, S, A, Q, V, T, L, P, H, K, N, I, Y, or R; and/or
   [0543] (iii) the amino acid at position 595, relative to a reference sequence numbered according to the amino acid sequence of SEQ ID NO: 138, W, S, P, T, A, G, L, Q, H, N, R, K, V, E, F, M, C, or Y.
[0544] 240. An isolated, e.g., recombinant, AAV particle comprising an AAV capsid variant and a nucleic acid comprising a transgene encoding a SOD1 targeting polynucleotide (e.g., a SOD1 targeting RNA agent, e.g., a siRNA duplex), wherein the AAV capsid variant comprises an amino sequence comprising the amino acid sequence of PLNGAVHLY (SEQ ID NO: 3648); and which further comprises one, two, three, or all of:
   [0545] (i) the amino acid T, A, L, R, V, C, I, K, M, N, P, Q, or S at position 593 numbered according to SEQ ID NO: 138 or at position 600 numbered according to SEQ ID NO: 5, 8, or 3636;
   [0546] (ii) the amino acid G, M, S, A, Q, V, T, L, P, H, K, N, I, Y, or R at position 594 numbered according to SEQ ID NO: 138 or at position 601 numbered according to SEQ ID NO: 5, 8, or 3636; and/or
   [0547] (iii) the amino acid W, S, P, T, A, G, L, Q, H, N, R, K, V, E, F, M, C, or Y at position 595 numbered according to SEQ ID NO: 138 or at position 602 numbered according to SEQ ID NO: 5, 8, or 3636;
   [0548] optionally, provided that the amino acids at positions 593-595, relative to a reference sequence numbered according to the amino acid sequence of SEQ ID NO: 138, does not comprise the amino acid sequence of TGW.
[0549] 241. The isolated AAV particle of any one of embodiments 238-240, wherein the AAV capsid variant comprises:
   [0550] (i) the amino acid L at position 593 numbered according to SEQ ID NO: 138 or at position 600 numbered according to SEQ ID NO: 5, 8, or 3636;
   [0551] (ii) the amino acid S at position 594 numbered according to SEQ ID NO: 138 or at position 601 numbered according to SEQ ID NO: 5, 8, or 3636; and/or
   [0552] (iii) the amino acid P at position 595 numbered according to SEQ ID NO: 138 or at position 602 numbered according to SEQ ID NO: 5, 8, or 3636.
[0553] 242. The isolated AAV particle of any one of embodiments 238-241, wherein the AAV capsid variant comprises the amino acid sequence of TMS, ASP, LGS, LSS, RST, TAA, TAG, TAL, TAS, TGT, TMA, TQP, TSA, TSP, TST, TVA, TVS, VMS, VSP, VSS, VTP, TGP, VAS, AAA, AAP, AGP, AGW, ALP, AMS, AQP, ATG, ATP, ATQ, ATS, AVG, CSP, CTP, IAA, IAG, IAS, IGG, IGS, IGW, ILG, IPP, IQP, IQS, ISG, ISP, ISS, ITP, KGW, KSS, LAA, LAG, LAH, LAN, LAP, LAQ, LAR, LAS, LAT, LGP, LGQ, LGT, LHP, LKS, LLP, LMA, LMG, LMP, LMQ, LMS, LNP, LPP, LQP, LQQ, LQR, LSA, LSG, LSH, LSK, LSN, LSP, LSQ, LSR, LST, LTA, LTN, LTP, LTS, LVG, MAP, NAL, NAQ, NAS, NLP, NMQ, NQP, NSP, NTP, NTQ, NTT, NVQ, PGW, QAP, QSP, RAA, RAG, RAQ, RAS, RGG, RGS, RGW, RIA, RIG, RIP, RLG, RLP, RLS, RLT, RML, RMS, RNS, RPG, RPP, RQG, RQL, RQP, RQQ, RQS, RSA, RSG, RSP, RSQ, RSS, RSV, RTA, RTG, RTL, RTP, RTQ, RTS, RTT, RVE, RYS, SAA, SAF, SAG, SAK, SAL, SAM, SAN, SAP, SAQ, SAV, SGP, SLP, SMA, SMG, SMQ, SMS, SPP, SQL, SQM, SQP, SQQ, SSL, SSM, SSP, SSR, SSS, STP, STQ, STS, SVA, SVG, SVQ, SVS, TAK, TAM, TAN, TAP, TAQ, TAT, TAV, TAW, TGA, TGC, TGF, TGG, TGL, TGM, TGQ, TGR, TGS, TGV, TGY, TKA, TKP, TKQ, TKS, TLA, TLG, TLP, TLQ, TLR, TLS, TMG, TMK, TMM, TMN, TMP, TMQ, TMT, TNA, TNG, TNQ, TNS, TPA, TPG, TPP, TPQ, TPR, TPS, TPT, TPW, TQA, TQH, TQK, TQL, TQM, TQN, TQQ, TQR, TQT, TQW, TRW, TSG, TSH, TSK, TSL, TSM, TSN, TSQ, TSS, TSV, TSW, TTA, TTG, TTK, TTP, TTQ, TTR, TTS, TTT, TVG, TVQ, TVW, TYA, TYS, VAA, VAG, VAK, VAN, VAQ, VAT, VGG, VGK, VGN, VGS, VHP, VKA, VKP, VKQ, VLG, VLP, VLS, VMA, VMP, VMQ, VNA, VNG, VNS, VPA, VPP, VPQ, VQA, VQG, VQN, VQP, VQQ, VQS, VQT, VRP, VSA, VSG, VSN, VSQ, VSR, VST, VTA, VTG, VTK, VTS, or VAP at positions 593-595 numbered according to SEQ ID NO: 138 or at positions 600-602 numbered according to SEQ ID NO: 5, 8, or 3636.
[0554] 243. The isolated AAV particle of any one of embodiments 230-242, wherein the AAV capsid variant comprises the amino acid sequence LSP at positions 593-595 numbered according to SEQ ID NO: 138 or at positions 600-602 numbered according to SEQ ID NO: 5, 8, or 3636.
[0555] 244. The isolated AAV particle of any one of embodiments 238-243, wherein the AAV capsid variant further comprises one, two, three, or all of an amino acid other than A at position 589 (e.g., D, S, or T), an amino acid other than Q at position 590 (e.g., K, H, L, P, or R), an amino acid other than A at position 591 (e.g., P or E), and/or an amino acid other than Q at position 592 (e.g., H, K, or P).
[0556] 245. The isolated AAV particle of embodiment 244, wherein:
   [0557] (i) the amino acid A, D, S, or T at position 589, numbered according to SEQ ID NO: 138;
   [0558] (ii) the amino acid Q, K, H, L, P, or R at position 590, numbered according to SEQ ID NO: 138;
   [0559] (iii) the amino acid A, E, or P at position 591, numbered according to SEQ ID NO: 138; and/or
   [0560] (iv) the amino acid Q, H, K, or P at position 592, numbered according to SEQ ID NO: 138.
[0561] 246. The isolated AAV particle of embodiment 244 or 245, wherein the AAV capsid variant comprises the amino acid sequence of:
   [0562] (i) AHAQ (SEQ ID NO: 3764), AKAQ (SEQ ID NO: 3763), ALAQ (SEQ ID NO: 3771), APAQ (SEQ ID NO: 3767), AQAH (SEQ ID NO: 3769), AQAK (SEQ ID NO: 3768), AQAP (SEQ ID NO: 3765), AQAQ (SEQ ID NO: 3759), AQEQ (SEQ ID NO: 3770), AQPQ (SEQ ID NO: 3761), ARAQ SEQ ID NO: 3772), DQAQ (SEQ ID NO: 3766), SQAQ (SEQ ID NO: 3760), or TQAQ (SEQ ID NO: 3773) at positions 589-592 numbered according to SEQ ID NO: 138 or at positions 596-599 numbered according to SEQ ID NO: 5, 8, or 3636; or
   [0563] (ii) AKAQ (SEQ ID NO: 3763) AQAQ (SEQ ID NO: 3759), AQPQ (SEQ ID NO: 3761), DQAQ (SEQ ID NO: 3766), or SQAQ (SEQ ID NO: 3760) at positions 589-592 numbered according to SEQ ID NO: 138 or at positions 596-599 numbered according to SEQ ID NO: 5, 8, or 3636.
[0564] 247. The isolated AAV particle of any one of embodiments 238-246, wherein the AAV capsid variant further comprises one, two, or all of an amino acid other than V at position 596 (e.g., G, F, D, L, A, I, or E), an amino acid other than Q at position 597 (e.g., K, R, H, E, L, or P), and/or an amino acid other than N at position 598 (e.g., H, K, T, I, S, D, P, or Y), relative to a reference sequence numbered according to the amino acid sequence of SEQ ID NO: 138.
[0565] 248. The isolated AAV particle of embodiment 247, wherein:
   [0566] (i) the amino acid V, G, F, D, L, A, I, or E at position 596 numbered according to SEQ ID NO: 138 or at position 603 numbered according to SEQ ID NO: 5, 8, or 3636;
   [0567] (ii) the amino acid Q, K, R, H, E, L, or P at position 597, numbered according to SEQ ID NO: 138 or at position 604 numbered according to SEQ ID NO: 5, 8, or 3636; and/or
   [0568] (iii) the amino acid N, H, K, T, I, S, D, P, or Y at position 598 numbered according to SEQ ID NO: 138 or at position 605 numbered according to SEQ ID NO: 5, 8, or 3636.
[0569] 249. An isolated, e.g., recombinant, AAV particle comprising an AAV capsid variant and a nucleic acid comprising a transgene encoding a SOD1 targeting polynucleotide (e.g., a SOD1 targeting RNAi), wherein the AAV capsid variant comprises PLNGAVHLY (SEQ ID NO: 3648), and optionally wherein the AAV capsid variant further comprises one, two, or all of an amino acid other than V at position 596 (e.g., G, F, D, L, A, I, or E), an amino acid other than Q at position 597 (e.g., K, R, H, E, L, or P), and/or an amino acid other than N at position 598 (e.g., H, K, T, I, S, D, P, or Y), numbered according to SEQ ID NO: 138.
[0570] 250. An isolated, e.g., recombinant, AAV particle comprising an AAV capsid variant and a nucleic acid comprising a transgene encoding a SOD1 targeting polynucleotide (e.g., a SOD1 targeting RNAi), wherein the AAV capsid variant comprises PLNGAVHLY (SEQ ID NO: 3648), and further comprising one, two, or all of:
   [0571] (i) V, G, F, D, L, A, I, or E at position 596 numbered according to SEQ ID NO: 138 or at position 603 numbered according to SEQ ID NO: 5, 8, or 3636;
   [0572] (ii) Q, K, R, H, E, L, or P at position 597 numbered according to SEQ ID NO: 138 or at position 604 numbered according to SEQ ID NO: 5, 8, or 3636; and/or
   [0573] (iii) N, H, K, T, I, S, D, P, or Y at position 598 numbered according to SEQ ID NO: 138 or at position 605 numbered according to SEQ ID NO: 5, 8, or 3636;
[0574] optionally, provided that the amino acids at positions 596-598 numbered according to the amino acid sequence of SEQ ID NO: 138 or positions 603-605 of SEQ ID NO: 5, 8, or 3636, does not comprise the amino acid sequence of VQN.
[0575] 251. The isolated AAV particle of any one of embodiments 238-250, which comprises the amino acid P at position 597 numbered according to SEQ ID NO: 138 or at position 604 numbered according to SEQ ID NO: 5, 8, or 3636.
[0576] 252. The isolated AAV particle of any one of embodiments 238-251, which comprises the amino acid K at position 597 numbered according to SEQ ID NO: 138 or at position 604 numbered according to SEQ ID NO: 5, 8, or 3636.
[0577] 253. The isolated AAV particle of any one of embodiments 247-252, wherein AAV capsid variant comprises the amino acid sequence of:
   [0578] (i) GQN, VQH, VQK, VQT, VQN, FQN, VKN, VQI, DQN, LQN, VQS, VRN, AQN, IQN, VHN, VLN, VEN, VQD, DKN, EQN, FQK, GHN, GQT, VKK, VKT, VPH, VPN, VQP, or VQY at positions 596-598 numbered according to SEQ ID NO: 138 or positions 603-605 numbered according to SEQ ID NO: 5, 8, or 3636; or
   [0579] (ii) VQN, VQT, VQK, DQN, VQH, FQN, AQN, VLN, LQN, VQI, VQS, EQN, GQT, VPN, VQD, VQP, VRN, or VKN at positions 596-598 numbered according to SEQ ID NO: 138 or positions 603-605 numbered according to SEQ ID NO: 5, 8, or 3636.
[0580] 254. The isolated AAV particle of any one of embodiments 247-253, which comprises the amino acid sequence of VKN, VPN, or VQN at positions 596-598 numbered according to SEQ ID NO: 138 or positions 603-605 numbered according to SEQ ID NO: 5, 8, or 3636.
[0581] 255. The isolated AAV particle of any one of embodiments 247-253, which comprises the amino acid sequence of VEN or VHN at positions 596-598 numbered according to SEQ ID NO: 138 or positions 603-605 numbered according to SEQ ID NO: 5, 8, or 363.
[0582] 256. The isolated AAV particle of any one of embodiments 238-255, wherein the AAV capsid variant comprises:
   [0583] (i) the amino acid sequence of any of SEQ ID NOs: 143, 148, 149, 151, 153-158, 160-163, 166, 168, 170, 171, 173-175, 177-179, 181, 182, 184-188, 191-197, 199-210, 212-215, 217-225, 227-231, 233, 234, 236-240, 243-262, 265, 267, 268, 270-277, 279, 282, 284, 285, 286, 288-293, 295, 296, 298, 300-314, 316-318, 320-327, 329, 331, 332, 334, 336-344, 346-350, 352-354, 356-367, 369, 371-380, 382-385, 387, 392-394, 396, 397, 399-401, 404-411, 413-415, 417, 419-429, 432, 433, 435-437, 438, 440-442, 444-447, 450-453, 456, 458-461, 464, 465, 467-469, 471-478, 480-483, 487-495, 497, 498, 500-503, 505, 507-512, 515-517, 522-525, 528-532, 534-539, 542-545, 547, 551-554, 558-561, 563-568, 570, 573, 574, 576, 579, 581, 582, 584, 586, 587, 592-596, 598, 601, 604-607, 610, 612, 614-619, 624-629, 631, 633-636, 640, 641, 645, 646, 649, 650, 658, 663, 664, 666, 668, 669, 672, 673, 675, 679, 683, 684, 686, 688, 689, 691, 693, 695, 697, 699, 700, 704, 705, 709-712, 720, 722, 726-731, 733, 736, 740, 745, 749, 750-752, 754, 755, 757, 758, 760-765, 767, 768, 771, 778, 780, 783-787, 792, 794, 797, 799-802, 804, 817, 818, 821, 824, 828, 831, 832, 834-837, 840-845, 847, 848, 851-853, 855, 858, 861, 862, 865, 869, 870-872, 874, 876, 882, 883, 887, 889, 890, 892-895, 897, 901, 903, 904, 905, 907, 910, 911, 913, 915, 919, 920, 923, 924, 926, 927, 929, 931-933, 935, 937, 940, 941, 943, 945-949, 953, 955, 957, 958, 960, 962, 964, 965, 971, 973, 974, 977, 986, 988, 989, 992, 994, 997, 998, 1000, 1004, 1007, 1013, 1015, 1017, 1018, 1020, 1025, 1027, 1029, 1030, 1031, 1033-1035, 1037-1039, 1043, 1046, 1049, 1052, 1056, 1057, 1059, 1062, 1065, 1067, 1068, 1070, 1073, 1075, 1077-1079, 1083-1087, 1089, 1090, 1094, 1100, 1101, 1103, 1106, 1107, 1110, 1111, 1112, 1114, 1115, 1117, 1119, 1125, 1126, 1129, 1132, or 1133;
   [0584] (ii) an amino acid sequence comprising any portion of an amino acid sequence in (i), e.g., any 2, 3, 4, 5, 6, 7, 8, 9, 10, 11, 12, 13, 14, 15, 16, 17, or 18 amino acids, e.g., consecutive amino acids, thereof;
   [0585] (iii) an amino acid sequence comprising at least one, two, or three but no more than four modifications, e.g., substitutions (e.g., conservative substitutions), insertions, or deletions, relative to any of the amino acid sequences in (i); or
   [0586] (iv) an amino acid sequence comprising at least one, two, or three but no more than four different amino acids, relative to any one of the amino acid sequences in (i).
[0587] 257. The isolated AAV particle of any one of embodiments 238-256, wherein the AAV capsid variant comprises:
   [0588] (i) the amino acid sequence of any of SEQ ID NOs: 143, 148-151, 153-158, 160-163, 166, 168, 170, 171, 173-175, 177-179, 181, 182, 184-188, 191-197, 199-210, 212-215, 217-225, 227-231, 233, 234, 236-240, 243-262, 265, 267, 268, 270-277, 279, 282, 284-286, 288-293, 295, 296, 298, 300-314, 316-318, 320-327, 329, 331, 332, 334, 336, 337-339, 340-344, 346-350, 352-354, 356-365, 367, 369, 371-380, 382-385, 387, 392-394, 396, 397, 399-401, 404-411, 413-415, 417, 419, 420-429, 432, 433, 435-438, 440-442, 444-447, 450-453, 456, 458, 459, 460, 461, 464, 465, 467-469, or 471-476;
   [0589] (ii) an amino acid sequence comprising any portion of an amino acid sequence in (i), e.g., any 2, 3, 4, 5, 6, 7, 8, 9, 10, 11, 12, 13, 14, 15, 16, 17, or 18 amino acids, e.g., consecutive amino acids, thereof;
   [0590] (iii) an amino acid sequence comprising at least one, two, or three but no more than four modifications, e.g., substitutions (e.g., conservative substitutions), insertions, or deletions, relative to any of the amino acid sequences in (i); or
   [0591] (iv) an amino acid sequence comprising at least one, two, or three but no more than four different amino acids, relative to any one of the amino acid sequences in (i).
[0592] 258. The isolated AAV particle of any one of embodiments 238-257, wherein the amino acid sequence of PLNGAVHLY (SEQ ID NO: 3648) is present in loop VIII.
[0593] 259. The isolated AAV particle of any one of embodiments 238-258, wherein the amino acid sequence of PLNGAVHLY (SEQ ID NO: 3648) is present immediately subsequent to position 586, relative to a reference sequence numbered according to the amino acid sequence of SEQ ID NO: 138.
[0594] 260. The isolated AAV particle of any one of embodiments 238-259, wherein the amino acid sequence of PLNGAVHLY (SEQ ID NO: 3648) replaces positions 587 and 588 (e.g., A587 and Q588), numbered according to SEQ ID NO: 138.
[0595] 261. The isolated AAV particle of any one of embodiments 238-260, wherein the amino acid sequence of PLNGAVHLY (SEQ ID NO: 3648) is present immediately subsequent to position 586 and replaces positions 587 and 588 (e.g., A587 and Q588), numbered according to SEQ ID NO: 138.
[0596] 262. The isolated AAV particle of any one of embodiments 138-261, wherein the amino acid sequence of PLNGAVHLY (SEQ ID NO: 3648) corresponds to positions 587-595 of SEQ ID NO: 5, 8, or 3636.
[0597] 263. An isolated, e.g., recombinant, AAV particle comprising an AAV capsid variant and a nucleic acid comprising a transgene encoding a SOD1 targeting polynucleotide (e.g., a SOD1 targeting RNA agent, e.g., a siRNA duplex), wherein the AAV capsid variant comprises X1-X2-X3-X4-X5-X6-X7-X8-X9-X10-X11-X12-X13-X14-X15-X16-X17-X18-X19, wherein:
   [0598] (i) X1 is: P, A, D, E, F, G, H, K, L, N, Q, R, S, T, or V;
   [0599] (ii) X2 is: L, D, E, F, H, I, M, N, P, Q, R, S, or V;
   [0600] (iii) X3 is: N, A, D, E, G, H, I, K, Q, S, T, V, or Y;
   [0601] (iv) X4 is: G, A, C, D, E, P, Q, R, S, T, V, or W;
   [0602] (v) X5 is: A, C, D, E, F, G, H, I, K, N, P, Q, R, S, T, V, W, or Y;
   [0603] (vi) X6 is: V, A, C, D, E, F, G, H, I, K, L, M, N, Q, R, S, T, or Y;
   [0604] (vii) X7 is: H, A, D, E, G, I, K, L, M, N, P, Q, R, S, T, V, or Y;
   [0605] (viii) X8 is: L, A, D, E, F, G, H, I, K, M, N, P, Q, R, S, T, V, or Y;
   [0606] (ix) X9 is: Y, A, C, D, E, F, G, H, I, K, L, M, N, Q, R, S, T, V, or W;
   [0607] (x) X10 is: A, C, D, E, F, G, H, I, K, L, N, P, Q, R, S, T, V, or; Y;
   [0608] (xi) X11 is: Q, A, D, E, H, K, L, P, R, or T;
   [0609] (xii) X12 is: A, D, E, G, H, L, N, P, Q, R, S, T, or V;
   [0610] (xiii) X13 is: Q, E, H, K, L, P, R, or T;
   [0611] (xiv) X14 is: T, A, C, D, E, F, G, H, I, K, L, M, N, P, Q, R, S, V, W, or Y;
   [0612] (xv) X15 is: G, A, C, D, E, F, H, I, K, L, M, N, P, Q, R, S, T, V, W, or Y;
   [0613] (xvi) X16 is: W, A, C, D, E, F, G, H, I, K, L, M, N, P, Q, R, S, T, V, or Y;
   [0614] (xvii) X17 is: V, A, D, E, F, G, H, I, or L;
   [0615] (xviii) X18 is: Q, E, H, K, L, P, or R; and/or
   [0616] (xix) X19 is: N, D, H, I, K, P, S, T, or Y.
[0617] 264. The isolated AAV particle of embodiment 263, wherein:
   [0618] (i) X1 is: P, Q, A, S, T, R, H, L, or K;
   [0619] (ii) X2 is: L, I, V, H, or R;
   [0620] (iii) X3 is: N, D, K, Y, or I;
   [0621] (iv) X4 is: G, S, R, C, or A;
   [0622] (v) X5 is: A, S, G, N, T, D, Y, Q, V, or C;
   [0623] (vi) X6 is: V, I, L, A, F, D, or G;
   [0624] (vii) X7 is: H, N, Q, P, D, L, R, or Y;
   [0625] (viii) X8 is: L, H, V, I, or R;
   [0626] (ix) X9 is Y;
   [0627] (x) X10 is: A, D, S, or T;
   [0628] (xi) X11 is: Q, K, H, L, P, or R;
   [0629] (xii) X12 is: A, P, E, or S;
   [0630] (xiii) X13 is: Q, K, H, or P;
   [0631] (xiv) X14 is: L, T, V, S, R, I, A, N, C, P, Q, M, or K;
   [0632] (xv) X15 is: S, G, M, T, A, K, Q, V, I, R, N, P, L, H, Y;
   [0633] (xvi) X16 is: P, W, S, K, Q, G, C, R, A, N, T, V, M, H, L, E, F, or Y;
   [0634] (xvii) X17 is: V, D, F, A, E, L, G, or I;
   [0635] (xviii) X18 is: Q, R, P, K, L, H, or E; and/or
   [0636] (xix) X19 is: N, H, D, S, T, P, K, I, or Y.
[0637] 265. The isolated AAV particle of embodiment 263 or 264, wherein:
   [0638] (i) X1 is: P, A, S, Q, or T;
   [0639] (ii) X2 is L or I;
   [0640] (iii) X3 is N or D;
   [0641] (iv) X4 is G or S;
   [0642] (v) X5 is: A, S, G, N, or T;
   [0643] (vi) X6 is V;
   [0644] (vii) X7 is H;
   [0645] (viii) X8 is: L, H, V, or I
   [0646] (ix) X9 is Y;
   [0647] (x) X10 is: A, D, or S;
   [0648] (xi) X11 is Q or K;
   [0649] (xii) X12 is A or P;
   [0650] (xiii) X13 is Q;
   [0651] (xiv) X14 is: L, T, V, S, R, I, A, N, C, P, Q, or M;
   [0652] (xv) X15 is: S, G, M, T, A, K, Q, V, I, R, N, P, L, or H;
   [0653] (xvi) X16 is: P, W, S, K, Q, G, C, R, A, N, T, V, M, H, L, or E;
   [0654] (xvii) X17 is: V, D, F, A, E, L, or G;
   [0655] (xviii) X18 is: Q, R, P, K, or L; and/or
   [0656] (xix) X19 is: N, H, D, S, T, P, K, or I.
[0657] 266. The isolated AAV particle of any one of embodiments 263-265, wherein X1-X2-X3-X4-X5-X6-X7-X8-X9-X10-X11-X12-X13-X14-X15-X16-X17-X18-X19 is present immediately subsequent to position 586, numbered according to SEQ ID NO: 5, 8, 138, or 3636.
[0658] 267. The isolated AAV particle of any one of embodiments 263-266, wherein X1-X2-X3-X4-X5-X6-X7-X8-X9-X10-X11-X12-X13-X14-X15-X16-X17-X18-X19 replaces positions 587-598 (e.g., A587, Q588, A589, Q590, A591, Q592, T593, G594, W595, V596, Q597, N598), numbered according to SEQ ID NO: 138.
[0659] 268. The isolated AAV particle of any one of embodiments 263-267, wherein X1-X2-X3-X4-X5-X6-X7-X8-X9-X10-X11-X12-X13-X14-X15-X16-X17-X18-X19 is present immediately subsequent to position 586 and replaces positions 587-598 (e.g., A587, Q588, A589, Q590, A591, Q592, T593, G594, W595, V596, Q597, N598), numbered according to SEQ ID NO: 138.
[0660] 269. The isolated AAV particle of any one of embodiments 263-268, wherein X1-X2-X3-X4-X5-X6-X7-X8-X9-X10-X11-X12-X13-X14-X15-X16-X17-X18-X19 corresponds to positions 587-605 of SEQ ID NO: 5, 8, or 3636.
[0661] 270. An isolated, e.g., recombinant, AAV particle comprising an AAV capsid variant and a nucleic acid comprising a transgene encoding a SOD1 targeting polynucleotide (e.g., a SOD1 targeting RNAi), wherein the AAV capsid variant comprises:
   [0662] (a) the amino acid sequence of any one of SEQ ID NOs: 139-1138;
   [0663] (b) an amino acid sequence comprising at least 3, 4, 5, 6, 7, 8, 9, 10, 11, 12, 13, 14, 15, 16, 17, or 18 consecutive amino acids from any one of SEQ ID NOs: 139-1138; or
   [0664] (c) an amino acid sequence comprising at least one, two, or three but no more than four different amino acids, relative to the amino acid sequence of any one of SEQ ID NOs: 139-1138;
   [0665] (d) an amino sequence comprising at least one, two, or three but no more than four modifications, e.g., substitutions (e.g., conservative substitutions), insertions, or deletions, relative to the amino acid sequence of any one of SEQ ID NOs: 139-1138;
   [0666] optionally wherein the AAV capsid variant does not comprise the amino acid sequence of TGW at positions 593-595, relative to a reference sequence numbered according to the amino acid sequence of SEQ ID NO: 138.
[0667] 271. An isolated, e.g., recombinant, AAV particle comprising an AAV capsid variant and a nucleic acid comprising a transgene encoding a SOD1 targeting polynucleotide (e.g., a SOD1 targeting RNA agent, e.g., a siRNA duplex), wherein the AAV capsid variant comprises:
   [0668] (a) the amino acid sequence of any one of SEQ ID NOs: 139-476;
   [0669] (b) an amino acid sequence comprising at least 3, 4, 5, 6, 7, 8, 9, 10, 11, 12, 13, 14, 15, 16, 17, or 18 consecutive amino acids from any one of SEQ ID NOs: 139-476; or
   [0670] (c) an amino acid sequence comprising at least one, two, or three but no more than four different amino acids, relative to the amino acid sequence of any one of SEQ ID NOs: 139-476;
   [0671] (d) an amino sequence comprising at least one, two, or three but no more than four modifications, e.g., substitutions (e.g., conservative substitutions), insertions, or deletions, relative to the amino acid sequence of any one of SEQ ID NOs: 139-476;
   [0672] optionally wherein the AAV capsid variant does not comprise the amino acid sequence of TGW at positions 593-595, relative to a reference sequence numbered according to the amino acid sequence of SEQ ID NO: 138.
[0673] 272. An isolated, e.g., recombinant, AAV particle comprising an AAV capsid variant and a nucleic acid comprising a transgene encoding a SOD1 targeting polynucleotide (e.g., a SOD1 targeting RNAi), or a fragment thereof, wherein the AAV capsid variant comprises:
   [0674] (a) the amino acid sequence of any one of SEQ ID NOs: 140, 142-144, 148-150, 154-158, 160, 161, 163, 165, 166, 168, 170, 171, 173-175, 177-179, 181, 182, 184-197, 199-214, 218-222, 224, 225, 227-241, 243-253, 255-262, 265, 267, 268, 270, 271, 273, 274, 276, 277, 279, 282, 284-286, 288-296, 300-310, 312, 315, 317, 318, 320-323, 326, 327, 331, 332, 334, 336, 337, 339, 340, 341, 343, 344, 346, 349, 351, 352, 356-363, 365-367, 369, 370, 372-376, 378-381, 383-389, 392, 393, 395, 397-400, 404, 407, 408, 411, 412, 415, 417, 420-430, 432, 433, 435-438, 441, 442, 446-448, 451-453, 456, 458, 460, 461, 465, 467-469, 471-473, 475, 476, 478, 480, 482, 485, 488, 490, 492, 493, 495, 498, 500-503, 505, 507, 509, 510, 517, 522-526, 528, 535-538, 540, 543-545, 547, 551, 552, 557, 559, 561, 564, 568, 570, 572-574, 577, 585-588, 592-594, 596, 601, 602, 605, 612, 616, 619, 622, 624, 627, 628, 635, 640, 641, 646, 658, 660, 665, 666, 675, 678, 680, 683, 684, 689, 693, 695, 707, 711, 718, 719, 724, 727, 735, 740, 748, 751, 755, 758, 759, 765, 766, 768, 778, 783, 787, 791, 797, 801, 804, 817, 821, 832, 841, 852, 856, 861, 862, 864, 894, 906, 911, 913, 924, 929, 945, 959, 961, 970, 975, 980, 983, 988, 992, 1009, 1015, 1019, 1027, 1032, 1036, 1038, 1047, 1051, 1061, 1077, 1081, 1095, or 1113;
   [0675] (b) an amino acid sequence comprising at least 3, 4, 5, 6, 7, 8, 9, 10, 11, 12, 13, 14, 15, 16, 17, or 18 consecutive amino acids from any one of the amino acid sequences in (i); or
   [0676] (c) an amino acid sequence comprising at least one, two, or three but no more than four different amino acids, relative to the amino acid sequence of any one of the amino acid sequences in (i);
   [0677] (d) an amino sequence comprising at least one, two, or three but no more than four modifications, e.g., substitutions (e.g., conservative substitutions), insertions, or deletions, relative to the amino acid sequence of any one of the amino acid sequences in (i);
   [0678] optionally wherein the AAV capsid variant does not comprise the amino acid sequence of TGW at positions 593-595, relative to a reference sequence numbered according to the amino acid sequence of SEQ ID NO: 138.
[0679] 273. The isolated AAV particle of embodiment 270, wherein the AAV capsid variant comprises an amino acid sequence comprising at least 4, 5, 6, 7, 8, 9, 10, 11, 12, 13, 14, 15, 16, 17, or 18 consecutive amino acids from any one of SEQ ID NOs: 139-1138.
[0680] 274. The AAV capsid variant of any one of embodiments 270, 271 or 273, wherein the AAV capsid variant comprises an amino acid sequence comprising at least 4, 5, 6, 7, 8, 9, 10, 11, 12, 13, 14, 15, 16, 17, or 18 consecutive amino acids from SEQ ID NO: 314.
[0681] 275. The AAV capsid variant of any one of embodiments 270 or 273, wherein the AAV capsid variant comprises an amino acid sequence comprising at least 4, 5, 6, 7, 8, 9, 10, 11, 12, 13, 14, 15, 16, 17, or 18 consecutive amino acids from SEQ ID NO: 566.
[0682] 276. The isolated AAV particle of embodiment 270 or 271, comprising an amino acid sequence comprising at least 4, 5, 6, 7, 8, 9, 10, 11, 12, 13, 14, 15, 16, 17, or 18 consecutive amino acids from any one of SEQ ID NOs: 139-476.
[0683] 277. The isolated AAV particle of embodiment 270 or 272, wherein the AAV capsid variant comprises an amino acid sequence comprising at least 4, 5, 6, 7, 8, 9, 10, 11, 12, 13, 14, 15, 16, 17, or 18 consecutive amino acids from any one of SEQ ID NOs: 140, 142-144, 148-150, 154-158, 160, 161, 163, 165, 166, 168, 170, 171, 173-175, 177-179, 181, 182, 184-197, 199-214, 218-222, 224, 225, 227-241, 243-253, 255-262, 265, 267, 268, 270, 271, 273, 274, 276, 277, 279, 282, 284-286, 288-296, 300-310, 312, 315, 317, 318, 320-323, 326, 327, 331, 332, 334, 336, 337, 339, 340, 341, 343, 344, 346, 349, 351, 352, 356-363, 365-367, 369, 370, 372-376, 378-381, 383-389, 392, 393, 395, 397-400, 404, 407, 408, 411, 412, 415, 417, 420-430, 432, 433, 435-438, 441, 442, 446-448, 451-453, 456, 458, 460, 461, 465, 467-469, 471-473, 475, 476, 478, 480, 482, 485, 488, 490, 492, 493, 495, 498, 500-503, 505, 507, 509, 510, 517, 522-526, 528, 535-538, 540, 543-545, 547, 551, 552, 557, 559, 561, 564, 568, 570, 572-574, 577, 585-588, 592-594, 596, 601, 602, 605, 612, 616, 619, 622, 624, 627, 628, 635, 640, 641, 646, 658, 660, 665, 666, 675, 678, 680, 683, 684, 689, 693, 695, 707, 711, 718, 719, 724, 727, 735, 740, 748, 751, 755, 758, 759, 765, 766, 768, 778, 783, 787, 791, 797, 801, 804, 817, 821, 832, 841, 852, 856, 861, 862, 864, 894, 906, 911, 913, 924, 929, 945, 959, 961, 970, 975, 980, 983, 988, 992, 1009, 1015, 1019, 1027, 1032, 1036, 1038, 1047, 1051, 1061, 1077, 1081, 1095, 1113.
[0684] 278. The isolated AAV particle of embodiment 270, wherein the AAV capsid variant comprises an amino acid sequence comprising at least one, two, or three but no more than four different amino acids relative to the amino acid sequence of any one of SEQ ID NOs: 139-1138.
[0685] 279. The isolated AAV particle of embodiment 270 or 271, wherein the AAV capsid variant comprises an amino acid sequence comprising at least one, two, or three but no more than four different amino acids relative to the amino acid sequence of any one of SEQ ID NOs: 139-476.
[0686] 280. The isolated AAV particle of embodiment 270 or 272, wherein the AAV capsid variant comprises an amino acid sequence comprising at least one, two, or three but no more than four different amino acids relative to the amino acid sequence of any one of SEQ ID NOs: 140, 142-144, 148-150, 154-158, 160, 161, 163, 165, 166, 168, 170, 171, 173-175, 177-179, 181, 182, 184-197, 199-214, 218-222, 224, 225, 227-241, 243-253, 255-262, 265, 267, 268, 270, 271, 273, 274, 276, 277, 279, 282, 284-286, 288-296, 300-310, 312, 315, 317, 318, 320-323, 326, 327, 331, 332, 334, 336, 337, 339, 340, 341, 343, 344, 346, 349, 351, 352, 356-363, 365-367, 369, 370, 372-376, 378-381, 383-389, 392, 393, 395, 397-400, 404, 407, 408, 411, 412, 415, 417, 420-430, 432, 433, 435-438, 441, 442, 446-448, 451-453, 456, 458, 460, 461, 465, 467-469, 471-473, 475, 476, 478, 480, 482, 485, 488, 490, 492, 493, 495, 498, 500-503, 505, 507, 509, 510, 517, 522-526, 528, 535-538, 540, 543-545, 547, 551, 552, 557, 559, 561, 564, 568, 570, 572-574, 577, 585-588, 592-594, 596, 601, 602, 605, 612, 616, 619, 622, 624, 627, 628, 635, 640, 641, 646, 658, 660, 665, 666, 675, 678, 680, 683, 684, 689, 693, 695, 707, 711, 718, 719, 724, 727, 735, 740, 748, 751, 755, 758, 759, 765, 766, 768, 778, 783, 787, 791, 797, 801, 804, 817, 821, 832, 841, 852, 856, 861, 862, 864, 894, 906, 911, 913, 924, 929, 945, 959, 961, 970, 975, 980, 983, 988, 992, 1009, 1015, 1019, 1027, 1032, 1036, 1038, 1047, 1051, 1061, 1077, 1081, 1095, or 1113.
[0687] 281. The isolated AAV particle of embodiment 270, wherein the AAV capsid variant comprises an amino acid sequence comprising at least one, two, or three but no more than four modifications, e.g., substitutions (e.g., conservative substitutions), insertions, or deletions, relative to the amino acid sequence of SEQ ID NOs: 139-1138.
[0688] 282. The isolated AAV particle of embodiment 270 or 271, wherein the AAV capsid variant comprises an amino acid sequence comprising at least one, two, or three but no more than four modifications, e.g., substitutions (e.g., conservative substitutions), insertions, or deletions, relative to the amino acid sequence of SEQ ID NOs: 139-476.
[0689] 283. The AAV capsid variant of any one of embodiments 270, 271, 273, 274 or 282, wherein the AAV capsid variant comprises:
   [0690] (i) an amino acid sequence comprising at least one, two, or three but no more than four different amino acids relative to the amino acid sequence of SEQ ID NO: 314; or
   [0691] (ii) an amino acid sequence comprising at least one, two, or three but no more than four modifications, e.g., substitutions (e.g., conservative substitutions), insertions, or deletions, relative to SEQ ID NO: 314.
[0692] 284. The AAV capsid variant of any one of embodiments 270, 275 or 282, wherein the AAV capsid variant comprises:
   [0693] (i) an amino acid sequence comprising at least one, two, or three but no more than four different amino acids relative to the amino acid sequence of SEQ ID NO: 566; or
   [0694] (ii) an amino acid sequence comprising at least one, two, or three but no more than four modifications, e.g., substitutions (e.g., conservative substitutions), insertions, or deletions, relative to SEQ ID NO: 566.
[0695] 285. The isolated AAV particle of embodiment 270 or 272, wherein the AAV capsid variant comprises an amino acid sequence comprising at least one, two, or three but no more than four modifications, e.g., substitutions (e.g., conservative substitutions), insertions, or deletions, relative to any of SEQ ID NOs: 140, 142-144, 148-150, 154-158, 160, 161, 163, 165, 166, 168, 170, 171, 173-175, 177-179, 181, 182, 184-197, 199-214, 218-222, 224, 225, 227-241, 243-253, 255-262, 265, 267, 268, 270, 271, 273, 274, 276, 277, 279, 282, 284-286, 288-296, 300-310, 312, 315, 317, 318, 320-323, 326, 327, 331, 332, 334, 336, 337, 339, 340, 341, 343, 344, 346, 349, 351, 352, 356-363, 365-367, 369, 370, 372-376, 378-381, 383-389, 392, 393, 395, 397-400, 404, 407, 408, 411, 412, 415, 417, 420-430, 432, 433, 435-438, 441, 442, 446-448, 451-453, 456, 458, 460, 461, 465, 467-469, 471-473, 475, 476, 478, 480, 482, 485, 488, 490, 492, 493, 495, 498, 500-503, 505, 507, 509, 510, 517, 522-526, 528, 535-538, 540, 543-545, 547, 551, 552, 557, 559, 561, 564, 568, 570, 572-574, 577, 585-588, 592-594, 596, 601, 602, 605, 612, 616, 619, 622, 624, 627, 628, 635, 640, 641, 646, 658, 660, 665, 666, 675, 678, 680, 683, 684, 689, 693, 695, 707, 711, 718, 719, 724, 727, 735, 740, 748, 751, 755, 758, 759, 765, 766, 768, 778, 783, 787, 791, 797, 801, 804, 817, 821, 832, 841, 852, 856, 861, 862, 864, 894, 906, 911, 913, 924, 929, 945, 959, 961, 970, 975, 980, 983, 988, 992, 1009, 1015, 1019, 1027, 1032, 1036, 1038, 1047, 1051, 1061, 1077, 1081, 1095, or 1113.
[0696] 286. The isolated AAV particle of any one of embodiments 270-285, wherein 4, 5, 6, 7, 8, or 9 consecutive amino acids is not PLNG (SEQ ID NO: 3678), PLNGA (SEQ ID NO: 3679), PLNGAV (SEQ ID NO: 3680), PLNGAVHL (SEQ ID NO: 3682), and/or PLNGAVHLY (SEQ ID NO: 3648).
[0697] 287. The isolated AAV particle of any one of embodiments 270, 273, 278, 281, wherein the AAV capsid variant comprises the amino acid sequence of any one of SEQ ID NOs: 139-1138.
[0698] 288. The isolated AAV particle of any one of embodiments 270, 273, 275, 278 or 281, wherein the AAV capsid variant comprises the amino acid sequence of SEQ ID NO: 314.
[0699] 289. The isolated AAV particle of any one of embodiments 270, 273, 274, 278 or 281, wherein the AAV capsid variant comprises the amino acid sequence of SEQ ID NO: 566.
[0700] 290. The isolated AAV particle of any one of embodiments 270, 271, 273, 276, 278, 281 or 282, wherein the AAV capsid variant comprises the amino acid sequence of any one of SEQ ID NOs: 139-476.
[0701] 291. The isolated AAV particle of embodiment 270, 272, 273, 277, 278, 280, 281 or 285, wherein the AAV capsid variant comprises the amino acid sequence of any one of SEQ ID NOs: 140, 142-144, 148-150, 154-158, 160, 161, 163, 165, 166, 168, 170, 171, 173-175, 177-179, 181, 182, 184-197, 199-214, 218-222, 224, 225, 227-241, 243-253, 255-262, 265, 267, 268, 270, 271, 273, 274, 276, 277, 279, 282, 284-286, 288-296, 300-310, 312, 315, 317, 318, 320-323, 326, 327, 331, 332, 334, 336, 337, 339, 340, 341, 343, 344, 346, 349, 351, 352, 356-363, 365-367, 369, 370, 372-376, 378-381, 383-389, 392, 393, 395, 397-400, 404, 407, 408, 411, 412, 415, 417, 420-430, 432, 433, 435-438, 441, 442, 446-448, 451-453, 456, 458, 460, 461, 465, 467-469, 471-473, 475, 476, 478, 480, 482, 485, 488, 490, 492, 493, 495, 498, 500-503, 505, 507, 509, 510, 517, 522-526, 528, 535-538, 540, 543-545, 547, 551, 552, 557, 559, 561, 564, 568, 570, 572-574, 577, 585-588, 592-594, 596, 601, 602, 605, 612, 616, 619, 622, 624, 627, 628, 635, 640, 641, 646, 658, 660, 665, 666, 675, 678, 680, 683, 684, 689, 693, 695, 707, 711, 718, 719, 724, 727, 735, 740, 748, 751, 755, 758, 759, 765, 766, 768, 778, 783, 787, 791, 797, 801, 804, 817, 821, 832, 841, 852, 856, 861, 862, 864, 894, 906, 911, 913, 924, 929, 945, 959, 961, 970, 975, 980, 983, 988, 992, 1009, 1015, 1019, 1027, 1032, 1036, 1038, 1047, 1051, 1061, 1077, 1081, 1095, or 1113.
[0702] 292. The isolated AAV particle of any one of embodiments 1-291, wherein the AAV capsid variant comprises an amino acid sequence comprising at least 5, 6, 7, 8, or 9 consecutive amino acids from the amino acid sequence of PLNGAVHLY (SEQ ID NO: 3648), wherein:
   [0703] (i) the 5 consecutive amino acids comprise PLNGA (SEQ ID NO: 3679);
   [0704] (ii) the 6 consecutive amino acids comprise PLNGAV (SEQ ID NO: 3680);
   [0705] (iii) the 7 consecutive amino acids comprise PLNGAVH (SEQ ID NO: 3681);
   [0706] (iv) the 8 consecutive amino acids comprise PLNGAVHL (SEQ ID NO: 3682); or
   [0707] (v) the 9 consecutive amino acids comprise PLNGAVHLY (SEQ ID NO: 3648),
   [0708] wherein the AAV capsid variant comprises: (a) a VP1 protein comprising the amino acid sequence of SEQ ID NO: 138 or SEQ ID NO: 5, 8, or 3636; (b) a VP2 protein comprising the amino acid sequence of positions 138-736 of SEQ ID NO: 138 or positions 138-743 of SEQ ID NO: 5, 8, or 3636; (c) a VP3 protein comprising the amino acid sequence of positions 203-736 of SEQ ID NO: 138 or positions 203-743 of SEQ ID NO: 5, 8, or 3636; or (d) an amino acid sequence with at least 90% (e.g., at least about 95, 96, 97, 98, or 99%) sequence identity to any of the amino acid sequences in (a)-(c).
[0709] 293. The isolated AAV particle of any one of embodiments 1-292, wherein the AAV capsid variant comprises an amino acid sequence comprising at least 5, 6, 7, 8, or 9 consecutive amino acids from the amino acid sequence of PLNGAVHLY (SEQ ID NO: 3648), wherein:
   [0710] (i) the 5 consecutive amino acids comprise PLNGA (SEQ ID NO: 3679);
   [0711] (ii) the 6 consecutive amino acids comprise PLNGAV (SEQ ID NO: 3680);
   [0712] (iii) the 7 consecutive amino acids comprise PLNGAVH (SEQ ID NO: 3681);
   [0713] (iv) the 8 consecutive amino acids comprise PLNGAVHL (SEQ ID NO: 3682); or
   [0714] (v) the 9 consecutive amino acids comprise PLNGAVHLY (SEQ ID NO: 3648),
   [0715] wherein the AAV capsid variant comprises the amino acid sequence of any one of SEQ ID NOs: 5, 8, or 3636 or an amino acid sequence with at least 90% (e.g., at least about 95, 96, 97, 98, or 99%) sequence identity to any one of SEQ ID NOs: 5, 8, or 3636.
[0716] 294. The isolated AAV particle of any one of embodiments 1-293, wherein the AAV capsid variant comprises one or two, but no more than three different amino acids (e.g., substitutions, e.g., conservative substitutions) relative to the amino acid sequence of PLNGAVHLY (SEQ ID NO: 3648), wherein the AAV capsid variant comprises:
   [0717] (a) a VP1 protein comprising the amino acid sequence of SEQ ID NO: 5, 8, 138, or 3636;
   [0718] (b) a VP2 protein comprising the amino acid sequence of positions 138-736 of SEQ ID NO: 138 or positions 138-743 of SEQ ID NO: 5, 8, or 3636;
   [0719] (c) a VP3 protein comprising the amino acid sequence of positions 203-736 of SEQ ID NO: 138 or positions 203-743 of SEQ ID NO: 5, 8, or 3636; or
   [0720] (d) an amino acid sequence with at least 90% (e.g., at least about 95, 96, 97, 98, or 99%) sequence identity to any of the amino acid sequences in (a)-(c).
[0721] 295. The isolated AAV particle of any one of embodiments 1-294, wherein the AAV capsid variant comprises one or two, but no more than three different amino acids (e.g., substitutions, e.g., conservative substitutions) relative to the amino acid sequence of PLNGAVHLY (SEQ ID NO: 3648), wherein the AAV capsid variant comprises the amino acid sequence of any one of SEQ ID NOs: 5, 8, 138, or 3636 or an amino acid sequence with at least 90% (e.g., at least about 95, 96, 97, 98, or 99%) sequence identity to any one of SEQ ID NOs: 5, 8, 138, or 3636.
[0722] 296. The isolated AAV particle of any one of embodiments 292-295, wherein the amino acid sequence is present immediately subsequent to position 586, numbered according to any one of SEQ ID NO: 5, 8, 138, or 3636, optionally wherein the amino acid replaces positions 587 and 588 (e.g., A587 and Q588), numbered according to SEQ ID NO: 138.
[0723] 297. The isolated AAV particle of any one of embodiments 292-296, wherein the amino acid sequence corresponds to positions 587-595 of SEQ ID NO: 5, 8, or 3636.
[0724] 298. The isolated AAV particle of any one of embodiments 1-297, wherein the AAV capsid variant comprises one or two, but no more than three different amino acids (e.g., substitutions, e.g. conservative substitutions) relative to the amino acid sequence of PLNGAVHLYAQAQLSPVKN (SEQ ID NO: 566), wherein the AAV capsid variant comprises:
   [0725] (a) a VP1 protein comprising the amino acid sequence of SEQ ID NO: 5, 8, 138, or 3636;
   [0726] (b) a VP2 protein comprising the amino acid sequence of positions 138-736 of SEQ ID NO: 138 or positions 138-743 of SEQ ID NO: 5, 8, or 3636;
   [0727] (c) a VP3 protein comprising the amino acid sequence of positions 203-736 of SEQ ID NO: 138 or positions 203-743 of SEQ ID NO: 5, 8, or 3636; or
   [0728] (d) an amino acid sequence with at least 90% (e.g., at least about 95, 96, 97, 98, or 99%) sequence identity to any of the amino acid sequences in (a)-(c).
[0729] 299. The isolated AAV particle of any one of embodiments 1-298, wherein the AAV capsid variant comprises one or two, but no more than three different amino acids (e.g., substitutions, e.g., conservative substitutions) relative to the amino acid sequence of PLNGAVHLYAQAQLSPVKN (SEQ ID NO: 566), wherein the AAV capsid variant comprises the amino acid sequence of any one of SEQ ID NOs: 5, 8, 138, or 3636 or an amino acid sequence with at least 90% (e.g., at least about 95, 96, 97, 98, or 99%) sequence identity to any one of SEQ ID NOs: 5, 8, 138, or 3636.
[0730] 300. The isolated AAV particle of any one of embodiments 1-297, wherein the AAV capsid variant comprises one or two, but no more than three different amino acids (e.g., substitutions, e.g., conservative substitutions) relative to the amino acid sequence of PLNGAVHLYAQAQTGWVPN (SEQ ID NO: 314), wherein the AAV capsid variant comprises:
   [0731] (a) a VP1 protein comprising the amino acid sequence of SEQ ID NO: 5, 8, 138, or 3636;
   [0732] (b) a VP2 protein comprising the amino acid sequence of positions 138-736 of SEQ ID NO: 138 or positions 138-743 of SEQ ID NO: 5, 8, or 3636;
   [0733] (c) a VP3 protein comprising the amino acid sequence of positions 203-736 of SEQ ID NO: 138 or positions 203-743 of SEQ ID NO: 5, 8, or 3636; or
   [0734] (d) an amino acid sequence with at least 90% (e.g., at least about 95, 96, 97, 98, or 99%) sequence identity to any of the amino acid sequences in (a)-(c).
[0735] 301. The isolated AAV particle of any one of embodiments 1-297 or 300, wherein the AAV capsid variant comprises one or two, but no more than three different amino acids (e.g., substitutions, e.g., conservative substitutions) relative to the amino acid sequence of PLNGAVHLYAQAQTGWVPN (SEQ ID NO: 314), wherein the AAV capsid variant comprises the amino acid sequence of any one of SEQ ID NOs: 5, 8, 138, or 3636 or an amino acid sequence with at least 90% (e.g., at least about 95, 96, 97, 98, or 99%) sequence identity to any one of SEQ ID NOs: 5, 8, 138, or 3636.
[0736] 302. The isolated AAV particle of any one of embodiments 298-301, wherein the amino acid sequence is present immediately subsequent to position 586, numbered according to any one of SEQ ID NO: 5, 8, 138, or 3636, optionally wherein the amino acid replaces positions 587-598, numbered according to SEQ ID NO: 138.
[0737] 303. The isolated AAV particle of any one of embodiments 297-302, wherein the amino acid sequence corresponds to positions 587-605 of SEQ ID NO: 5 or 8.
[0738] 304. The isolated AAV particle of any one of the preceding embodiments, wherein the amino acid sequence is present in loop VIII.
[0739] 305. The isolated AAV particle of any one of embodiments 3-5, or 270-304, wherein the amino acid sequence is present immediately subsequent to position 586, 587, 588, 589, 590, 591, 592, 593, 594, or 595, relative to a reference sequence numbered according to the amino acid sequence of SEQ ID NO: 138.
[0740] 306. The isolated AAV particle of any one of embodiments 270-305, wherein the amino acid sequence is present immediately subsequent to position 586, relative to a reference sequence numbered according to the amino acid sequence of SEQ ID NO: 138.
[0741] 307. The isolated AAV particle of any one of embodiments 270-306, wherein the amino acid sequence replaces positions 587 and 588 (e.g., A587 and Q588), numbered according to SEQ ID NO: 138
[0742] 308. The isolated AAV particle of any one of embodiments 270-305, wherein the amino acid sequence is present immediately subsequent to position 588, relative to a reference sequence numbered according to the amino acid sequence of SEQ ID NO: 138.
[0743] 309. The isolated AAV particle of any one of embodiments 270-305, wherein the amino acid sequence is present immediately subsequent to position 592, relative to a reference sequence numbered according to the amino acid sequence of SEQ ID NO: 138.
[0744] 310. The isolated AAV particle of any one of embodiments 270-305, wherein the amino acid sequence is present immediately subsequent to position 595, relative to a reference sequence numbered according to the amino acid sequence of SEQ ID NO: 138.
[0745] 311. The isolated AAV particle of any one of embodiments 272-310, wherein the AAV capsid variant further comprises:
   [0746] (i) one, two, three, or all of an amino acid other than A at position 589, an amino acid other than Q at position 590, an amino acid other than A at position 591, and/or an amino acid other than Q at position 592;
   [0747] (ii) one, two, or all of an amino acid other than T at position 593, an amino acid other than G at position 594, and/or an amino acid other than W at position 595, relative to a reference sequence numbered according to the amino acid sequence of SEQ ID NO: 138
   [0748] (iii) one, two, or all of an amino acid other than V at position 596, an amino acid other than Q at position 597, and/or an amino acid other than N at position 598, relative to a reference sequence numbered according to the amino acid sequence of SEQ ID NO: 138.
[0749] 312. The isolated AAV particle of any one of the preceding embodiments, wherein the AAV capsid variant further comprises an amino acid other than A at position 587 and an amino acid other than Q at position 588.
[0750] 313. The isolated AAV particle of any one of embodiments 270-313, wherein the AAV capsid variant comprises the amino acid P at position 587 the amino acid L at position 588, and the amino acid sequence NGAVHLY (SEQ ID NO: 3689), which is present immediately subsequent to position 588, corresponding to or numbered according to SEQ ID NO: 5, 8, 138, or 3636.
[0751] 314. An isolated, e.g., recombinant, AAV particle comprising an AAV capsid variant and a nucleic acid comprising a transgene encoding a SOD1 targeting polynucleotide (e.g., a SOD1 targeting RNAi), wherein the AAV capsid variant comprises the amino acid P at position 587 the amino acid L at position 588, and the amino acid sequence NGAVHLY (SEQ ID NO: 3689) present immediately subsequent to position 588, corresponding to or numbered according to SEQ ID NO: 5, 8, 138, or 3636.
[0752] 315. The isolated AAV particle of any one of embodiments 270-314, wherein the AAV capsid variant further comprises:
   [0753] (i) one, two, or all of an amino acid other than T at position 593, an amino acid other than G at position 594, and/or an amino acid other than W at position 595, numbered according to the amino acid sequence of SEQ ID NO: 138; or
   [0754] (ii) one, two, or all of an amino acid other than T at position 600, an amino acid other than G at position 601, and/or an amino acid other than W at position 602, numbered according to the amino acid sequence of SEQ ID NO: 5, 8, or 3636.
[0755] 316. The isolated AAV particle of any one of embodiments 270-315, wherein the AAV capsid variant further comprises:
   [0756] (i) an amino acid other than T at position 593, an amino acid other than G at position 594, and an amino acid other than W at position 595, numbered according to the amino acid sequence of SEQ ID NO: 138; or
   [0757] (ii) an amino acid other than T at position 600, an amino acid other than G at position 601, and an amino acid other than W at position 602, numbered according to the amino acid sequence of SEQ ID NO: 5, 8, 3636.
[0758] 317. The isolated AAV particle of any one of embodiments 270-316, wherein the AAV capsid variant further comprises:
   [0759] (i) one, two, or all of the amino acid L at position 593, the amino acid S at position 594, and/or the amino acid P at position 595, numbered according to the amino acid sequence of SEQ ID NO: 138;
   [0760] (ii) one, two, or all of the amino acid L at position 600, the amino acid S at position 601, and/or the amino acid P at position 602, numbered according to the amino acid sequence of SEQ ID NO: 5, 8, or 3636.
[0761] 318. The isolated AAV particle of any one of embodiments 270-317, wherein the AAV capsid variant further comprises:
   [0762] (i) the amino acid L at position 593, the amino acid S at position 594, and the amino acid P at position 595, numbered according to the amino acid sequence of SEQ ID NO: 138; or
   [0763] (ii) the amino acid L at position 600, the amino acid S at position 601, and the amino acid P at position 602, numbered according to the amino acid sequence of SEQ ID NO: 5, 8, or 3636.
[0764] 319. The isolated AAV particle of any one of embodiments 270-318, wherein the AAV capsid variant further comprises:
   [0765] (i) one, two, or all of an amino acid other than V at position 596, an amino acid other than Q at position 597, and/or an amino acid other than N at position 598, numbered according to the amino acid sequence of SEQ ID NO: 138;
   [0766] (ii) one, two, or all of an amino acid other than V at position 603, an amino acid other than Q at position 604, and/or an amino acid other than N at position 605, numbered according to the amino acid sequence of SEQ ID NO: 5, 8, 3636.
[0767] 320. The isolated AAV particle of any one of embodiments 270-319, wherein the AAV capsid variant further comprises an amino acid other than Q at position 597 numbered according to the amino acid sequence of SEQ ID NO: 138 or at position 604 numbered according to SEQ ID NO: 5, 8, or 3636.
[0768] 321. The isolated AAV particle of any one of embodiments 270-320, wherein the AAV capsid variant further comprises the amino acid P at position 597 numbered according to the amino acid sequence of SEQ ID NO: 138 or at position 604 numbered according to SEQ ID NO: 5, 8, or 3636.
[0769] 322. The isolated AAV particle of any one of embodiments 270-320, wherein the AAV capsid variant further comprises the amino acid K at position 597 numbered according to the amino acid sequence of SEQ ID NO: 138 or at position 604 numbered according to SEQ ID NO: 5, 8, or 3636.
[0770] 323. The isolated AAV particle of any one of embodiments 270-320, wherein the AAV capsid variant further comprises the amino acid E or H at position 597 numbered according to the amino acid sequence of SEQ ID NO: 138 or at position 604 numbered according to SEQ ID NO: 5, 8, or 3636.
[0771] 324. The isolated AAV particle of any one of embodiments 270-320 or 322, wherein the AAV capsid variant further comprises the amino acid L at position 593, the amino acid S at position 594, the amino acid P at position 595, and the amino acid K at position 597, numbered according to the amino acid sequence of SEQ ID NO: 138.
[0772] 325. The isolated AAV particle of any one of embodiments 270-320, 322 or 324, wherein the AAV capsid variant further comprises the amino acid L at position 600, the amino acid S at position 601, the amino acid P at position 602, and the amino acid K at position 604, corresponding to or numbered according to the amino acid sequence of SEQ ID NO: 8 or 3636.
[0773] 326. The isolated AAV particle of any one of embodiments 270-320, 322, 324 or 325, wherein the AAV capsid variant comprises:
   [0774] (i) the amino acid sequence of PLNGAVHLY (SEQ ID NO: 3648), optionally where the amino acid sequence is present immediately subsequent to position 586 and replaces positions 587 and 588 (e.g., A587 and Q 588), numbered according to SEQ ID NO: 138; and
   [0775] (ii) the amino acid L at position 593, the amino acid S at position 594, the amino acid P at position 595, and the amino acid K at position 597, numbered according to the amino acid sequence of SEQ ID NO: 138.
[0776] 327. The isolated AAV particle of any one of embodiments 270-320, 322, 324-326, wherein the AAV capsid variant comprises:
   [0777] (i) the amino acid P at position 587, the amino acid L at position 588, and the amino acid sequence NGAVHLY (SEQ ID NO: 3689), which is present immediately subsequent to position 588, numbered according to SEQ ID NO: 138; and
   [0778] (ii) the amino acid L at position 593, the amino acid S at position 594, the amino acid P at position 595, and the amino acid K at position 597, numbered according to the amino acid sequence of SEQ ID NO: 138.
[0779] 328. The isolated AAV particle of any one of embodiments 270-320, 322, 234-327, wherein the AAV capsid variant comprises:
   [0780] (i) the amino acid P at position 587, the amino acid L at position 588, and the amino acid sequence NGAVHLY (SEQ ID NO: 3689), which is present immediately subsequent to position 588, corresponding to or numbered according to SEQ ID NO: 8 or 3636; and
   [0781] (ii) the amino acid L at position 600, the amino acid S at position 601, the amino acid P at position 602, and the amino acid K at position 604, corresponding to or numbered according to the amino acid sequence of SEQ ID NO: 8 or 3636.
[0782] 329. The isolated AAV particle of any one of embodiments 270-321, wherein the AAV capsid variant further comprises the amino acid P at position 597, numbered according to the amino acid sequence of SEQ ID NO: 138.
[0783] 330. The isolated AAV particle of any one of embodiments 270-321 or 329, wherein the AAV capsid variant further comprises the amino acid P at position 604, corresponding to or numbered according to the amino acid sequence of SEQ ID NO: 5 or 3636.
[0784] 331. The isolated AAV particle of any one of embodiments 270-321, 329 or 330, wherein the AAV capsid variant comprises:
   [0785] (i) the amino acid sequence of PLNGAVHLY (SEQ ID NO: 3648), optionally where the amino acid sequence is present immediately subsequent to position 586 and replaces positions 587 and 588 (e.g., A587 and Q 588), numbered according to SEQ ID NO: 138; and
   [0786] (ii) the amino acid P at position 597, numbered according to the amino acid sequence of SEQ ID NO: 138.
[0787] 332. The isolated AAV particle of any one of embodiments 270-321 or 329-331, wherein the AAV capsid variant comprises:
   [0788] (i) the amino acid P at position 587, the amino acid L at position 588, and the amino acid sequence NGAVHLY (SEQ ID NO: 3689), which is present immediately subsequent to position 588, numbered according to SEQ ID NO: 138; and
   [0789] (ii) the amino acid P at position 597, numbered according to the amino acid sequence of SEQ ID NO: 138.
[0790] 333. The isolated AAV particle of any one of embodiments 270-321 or 329-332, wherein the AAV capsid variant comprises:
   [0791] (i) the amino acid P at position 587, the amino acid L at position 588, and the amino acid sequence NGAVHLY (SEQ ID NO: 3689), which is present immediately subsequent to position 588, corresponding to or numbered according to SEQ ID NO: 5 or 3636; and
   [0792] (ii) the amino acid P at position 604, corresponding to or numbered according to the amino acid sequence of SEQ ID NO: 5 or 3636.
[0793] 334. An isolated, e.g., recombinant, AAV particle comprising an AAV capsid variant and a nucleic acid comprising a transgene encoding a SOD1 targeting polynucleotide (e.g., a SOD1 targeting RNAi), wherein the AAV capsid variant comprises:
   [0794] (i) the amino acid sequence of PLNGAVHLY (SEQ ID NO: 3648), optionally where the amino acid sequence is present immediately subsequent to position 586 and replaces positions 587 and 588 (e.g., A587 and Q 588), numbered according to SEQ ID NO: 138; and
   [0795] (ii) the amino acid L at position 593, the amino acid S at position 594, the amino acid P at position 595, and the amino acid K at position 597, numbered according to the amino acid sequence of SEQ ID NO: 138.
[0796] 335. An isolated, e.g., recombinant, AAV particle comprising an AAV capsid variant and a nucleic acid comprising a transgene encoding a SOD1 targeting polynucleotide (e.g., a SOD1 targeting RNAi), wherein the AAV capsid variant comprises:
   [0797] (i) the amino acid P at position 587, the amino acid L at position 588, and the amino acid sequence NGAVHLY (SEQ ID NO: 3689), which is present immediately subsequent to position 588, numbered according to SEQ ID NO: 138; and
   [0798] (ii) the amino acid L at position 593, the amino acid S at position 594, the amino acid P at position 595, and the amino acid K at position 597, numbered according to the amino acid sequence of SEQ ID NO: 138.
[0799] 336. An isolated, e.g., recombinant, AAV particle comprising an AAV capsid variant and a nucleic acid comprising a transgene encoding a SOD1 targeting polynucleotide (e.g., a SOD1 targeting RNAi), wherein the AAV capsid variant comprises:
   [0800] (i) the amino acid P at position 587, the amino acid L at position 588, and the amino acid sequence NGAVHLY (SEQ ID NO: 3689), which is present immediately subsequent to position 588, corresponding to or numbered according to SEQ ID NO: 8 or 3636; and
   [0801] (ii) the amino acid L at position 600, the amino acid S at position 601, the amino acid P at position 602, and the amino acid K at position 604, corresponding to or numbered according to the amino acid sequence of SEQ ID NO: 8 or 3636.
[0802] 337. An isolated, e.g., recombinant, AAV particle comprising an AAV capsid variant and a nucleic acid comprising a transgene encoding a SOD1 targeting polynucleotide (e.g., a SOD1 targeting RNAi), wherein the AAV capsid variant comprises:
   [0803] (i) the amino acid sequence of PLNGAVHLY (SEQ ID NO: 3648), optionally where the amino acid sequence is present immediately subsequent to position 586 and replaces positions 587 and 588 (e.g., A587 and Q 588), numbered according to SEQ ID NO: 138; and
   [0804] (ii) the amino acid P at position 597, numbered according to the amino acid sequence of SEQ ID NO: 138.
[0805] 338. An isolated, e.g., recombinant, AAV particle comprising an AAV capsid variant and a nucleic acid comprising a transgene encoding a SOD1 targeting polynucleotide (e.g., a SOD1 targeting RNAi), wherein the AAV capsid variant comprises:
   [0806] (i) the amino acid P at position 587, the amino acid L at position 588, and the amino acid sequence NGAVHLY (SEQ ID NO: 3689), which is present immediately subsequent to position 588, numbered according to SEQ ID NO: 138; and
   [0807] (ii) the amino acid P at position 597, numbered according to the amino acid sequence of SEQ ID NO: 138.
[0808] 339. An isolated, e.g., recombinant, AAV particle comprising an AAV capsid variant and a nucleic acid comprising a transgene encoding a SOD1 targeting polynucleotide (e.g., a SOD1 targeting RNAi), wherein the AAV capsid variant comprises:
   [0809] (i) the amino acid P at position 587, the amino acid L at position 588, and the amino acid sequence NGAVHLY (SEQ ID NO: 3689), which is present immediately subsequent to position 588, corresponding to or numbered according to SEQ ID NO: 5 or 3636; and
   [0810] (ii) the amino acid P at position 604, corresponding to or numbered according to the amino acid sequence of SEQ ID NO: 5 or 3636.
[0811] 340. The isolated AAV particle of any one of the preceding embodiments, wherein the AAV capsid variant further comprises:
   [0812] (i) a modification, e.g., an insertion, substitution (e.g., conservative substitution), and/or deletion, in loop I, II, IV, and/or VI; and/or
   [0813] (ii) a substitution at position K449, e.g., a K449R substitution, numbered according to SEQ ID NO: 138.
[0814] 341. The isolated AAV particle of any one of the preceding embodiments, wherein the AAV capsid variant comprises an amino acid sequence comprising at least one, two or three modifications, e.g., substitutions (e.g., conservative substitutions), but not more than 30, 20 or 10 modifications, e.g., substitutions (e.g., conservative substitutions), relative to the amino acid sequence of SEQ ID NO: 138.
[0815] 342. The isolated AAV particle of any one of the preceding embodiments, wherein the AAV capsid variant comprises an amino acid sequence comprising at least one, two or three, but no more than 30, 20 or 10 different amino acids relative to the amino acid sequence of SEQ ID NO: 138.
[0816] 343. The isolated AAV particle of any one of the preceding embodiments, wherein the AAV capsid variant comprises the amino acid sequence of SEQ ID NO: 138, or an amino acid sequence with at least 80% (e.g., at least about 85, 90, 95, 96, 97, 98, or 99%) sequence identity thereto.
[0817] 344. The isolated AAV particle of any one of the preceding embodiments, wherein the AAV capsid variant comprises the amino acid sequence of SEQ ID NO: 138.
[0818] 345. The isolated AAV particle of any one of the preceding embodiments, wherein the AAV capsid variant comprises an amino acid sequence encoded by the nucleotide sequence of SEQ ID NO: 137, or a sequence with at least 80% (e.g., at least about 85, 90, 95, 96, 97, 98, or 99%) sequence identity thereto.
[0819] 346. The isolated AAV particle of any one of the preceding embodiments, wherein the nucleotide sequence encoding the capsid variant comprises the nucleotide sequence of SEQ ID NO: 137, or a sequence with at least 80% (e.g., at least about 85, 90, 95, 96, 97, 98, or 99%) sequence identity thereto.
[0820] 347. The isolated AAV particle of any one of the preceding embodiments, wherein the AAV capsid variant comprises a VP1 protein, a VP2 protein, a VP3 protein, or a combination thereof.
[0821] 348. The isolated AAV particle of any one of embodiments 1-347, wherein the AAV capsid variant comprises the amino acid sequence corresponding to positions 138-743, e.g., a VP2, of SEQ ID NO: 5, 8, or 3636, or a sequence with at least 80% (e.g., at least about 85, 90, 95, 96, 97, 98, or 99%) sequence identity thereto.
[0822] 349. The isolated AAV particle of any one of embodiments 1-348, wherein the AAV capsid variant comprises the amino acid sequence corresponding to positions 203-743, e.g., a VP3, of SEQ ID NO: 5, 8, or 3636, or a sequence with at least 80% (e.g., at least about 85, 90, 95, 96, 97, 98, or 99%) sequence identity thereto.
[0823] 350. The isolated AAV particle of any one of embodiments 1-349, wherein the AAV capsid variant comprises the amino acid sequence corresponding to positions 138-736, e.g., a VP2, of SEQ ID NO: 138, or a sequence with at least 80% (e.g., at least about 85, 90, 95, 96, 97, 98, or 99%) sequence identity thereto.
[0824] 351. The isolated AAV particle of any one of embodiments 1-350, wherein the AAV capsid variant comprises the amino acid sequence corresponding to positions 203-736, e.g., a VP3, of SEQ ID NO: 138, or a sequence with at least 80% (e.g., at least about 85, 90, 95, 96, 97, 98, or 99%) sequence identity thereto.
[0825] 352. An isolated, e.g., recombinant, AAV particle comprising an AAV capsid variant and a nucleic acid comprising a transgene encoding a SOD1 targeting polynucleotide (e.g., a SOD1 targeting RNAi), wherein the AAV capsid variant comprises the amino acid sequence of SEQ ID NO: 5.
[0826] 353. The isolated AAV particle of embodiment 352, wherein the nucleotide sequence encoding the AAV capsid variant comprises the nucleotide sequence of SEQ ID NO: 4.
[0827] 354. An isolated, e.g., recombinant, AAV particle comprising an AAV capsid variant and a nucleic acid comprising a transgene encoding a SOD1 targeting polynucleotide (e.g., a SOD1 targeting RNAi), wherein the AAV capsid variant comprises the amino acid sequence of SEQ ID NO: 8.
[0828] 355. The isolated AAV particle of embodiment 354, wherein the nucleotide sequence encoding the AAV capsid variant comprises the nucleotide sequence of SEQ ID NO: 7.
[0829] 356. An isolated, e.g., recombinant, AAV particle comprising an AAV capsid variant and a nucleic acid comprising a transgene encoding a SOD1 targeting polynucleotide (e.g., a SOD1 targeting RNAi), wherein the AAV capsid variant comprises the amino acid sequence of SEQ ID NO: 3636.
[0830] 357. The isolated AAV particle of embodiment 356, wherein the nucleotide sequence encoding the AAV capsid variant comprises the nucleotide sequence of SEQ ID NO: 3623.
[0831] 358. The isolated AAV particle of any one of the preceding embodiments, wherein the AAV capsid variant does not comprise:
   [0832] (i) the amino acid sequence of TLAVPFK (SEQ ID NO: 1262) present immediately subsequent to position 588, numbered according to SEQ ID NO: 138;
   [0833] (ii) an amino acid sequence present immediately subsequent to position 586 to 599, e.g., 586 to 594, 587 to 595, 588 to 596, 589 to 597, 590 to 598 numbered relative to SEQ ID NO: 138, having at least 5 consecutive amino acids corresponding to positions 586 to 594 numbered relative to SEQ ID NO: 138, of any the amino acid sequences provided in Table 1 of WO2020223276, the contents of which are hereby incorporated by reference in their entirety; or
   [0834] (iii) an amino acid sequence present immediately subsequent to position 586 to 599, e.g., 586 to 594, 587 to 595, 588 to 596, 589 to 597, 590 to 598 numbered relative to SEQ ID NO: 138, having at least 5 consecutive amino acids corresponding to positions 586 to Macaca fascicularis 594 numbered relative to SEQ ID NO: 138, of any SEQ ID NOs: 1, 3, 12, 13, or 138.
[0835] 359. The isolated AAV particle of any one of the preceding embodiments, wherein the AAV capsid variant has an increased tropism for a CNS cell or tissue, e.g., a brain cell, brain tissue, spinal cord cell, or spinal cord tissue, relative to the tropism of a reference sequence comprising the amino acid sequence of SEQ ID NO: 138.
[0836] 360. The isolated AAV particle of any one of embodiments 15-359, wherein the AAV capsid variant has an increased tropism for a CNS cell or tissue, e.g., a brain cell, brain tissue, spinal cord cell, or spinal cord tissue, relative to the tropism of a reference sequence comprising the amino acid sequence of SEQ ID NO: 3636.
[0837] 361. The isolated AAV particle of any one of embodiments 15-360, wherein the AAV capsid variant is enriched at least about 1.1, 1.2, 1.3, 1.4, 1.5, 1.6, 1.7, 1.8, 1.9, 2, 2.5, 3, 3.5, 4, 4.5, 5, 5.5, or 6-fold, in the brain compared to a reference sequence of SEQ ID NO: 3636, e.g., when measured by an assay as described in Example 18.
[0838] 362. The isolated AAV particle of any one of embodiments 71, 74, 75, 272, 277, 280, 285, 286, 291 or 304-360, wherein the AAV capsid variant results in greater than 1, 2, 5, 10, 20, 30, 40, 50, or 100 reads per sample, e.g., when analyzed by an NGS sequencing assay, e.g., as described in Example 18.
[0839] 363. The isolated AAV particle of any one of embodiments 1-362, wherein the AAV capsid variant is enriched in the brain of at least two to three species, e.g., a non-human primate and rodent (e.g., mouse), e.g., as compared to a reference sequence of SEQ ID NO: 138.
[0840] 364. The isolated AAV particle of embodiment 363, wherein the at least two to three species are Macaca fascicularis, Chlorocebus sabaeus, Callithrix jacchus, and/or mouse (e.g., BALB/c mice).
[0841] 365. The isolated AAV particle of any one of the preceding embodiments, wherein the AAV capsid variant further comprises a modification, e.g., substitution (e.g., conservative substitution), insertion, or deletion, that results in one, two, three or all of: (1) reduced tropism in the liver; (2) de-targeted expression in the liver; (3) reduced activity in the liver; and/or (4) reduced binding to galactose.
[0842] 366. The AAV capsid variant of any one of the preceding embodiments, wherein the AAV capsid variant further comprises:
   [0843] (i) a modification e.g., substitution (e.g., conservative substitution), insertion, or deletion, at position N470 (e.g., N470A), D271 (e.g., D271A), N272 (e.g., N297A), Y446 (e.g., Y446A), N498 (e.g., N498Y or N4981), W503 (e.g., W530R or W530A), L620 (e.g., L620F), or a combination thereof, relative to a reference sequence numbered according to SEQ ID NO: 138; or
   [0844] (ii) one, two, three, four, five or all of an amino acid other than N at position 470 (e.g., A), an amino acid other than D at position 271 (e.g., A), an amino acid other than N at position 272 (e.g., A), an amino acid other than Y at position 446 (e.g., A), and amino acid other than N at position 498 (e.g., Y or I), and amino acid other than W at position 503 (e.g., R or A), and amino acid other than L at position 620 (e.g., F), relative to a reference sequence numbered according to SEQ ID NO: 138.
[0845] 367. The AAV particle of any one of the above embodiments, wherein the SOD1 targeting polynucleotide is a single-stranded antisense RNA molecule, a single-stranded siRNA, or a double-stranded RNA (e.g., a siRNA duplex) that inhibits expression of SOD1.
[0846] 368. The AAV particle of embodiment 367, wherein the SOD1 targeting polynucleotide is a siRNA duplex comprising a sense strand and an antisense strand.
[0847] 369. The AAV particle of any one of the above embodiments, wherein SOD1 comprises a wild type SOD1 gene, mRNA, and/or protein; a mutated SOD1 gene, mRNA, and/or protein comprising at least one mutation; or a combination thereof.
[0848] 370. The AAV particle of embodiments 368 or 369, wherein the antisense strand comprises a region that is substantially complementary (e.g., at least 70%, 75%, 80%, 85%, 90%, 95%, 99% or 100% complementary) to at least part of an mRNA transcript of a SOD1 gene (e.g., a human SOD1 gene).
[0849] 371. The AAV particle of embodiments 368 or 369, wherein the antisense strand comprises a region that is substantially complementary (e.g., at least 70%, 75%, 80%, 85%, 90%, 95%, 99% or 100% complementary) to at least part of a SOD1 gene (e.g., a human SOD1 gene).
[0850] 372. The AAV particle of embodiment 371, wherein the antisense strand comprises a region that is substantially complementary (e.g., at least 70%, 75%, 80%, 85%, 90%, 95%, 99% or 100% complementary) to a mRNA coding region of a SOD1 gene, or a non-coding region of a SOD1 gene.
[0851] 373. The AAV particle of any one of embodiments 369-372, wherein the region that is substantially complementary is 30 nucleotides or less (e.g., 19-24 nucleotides in length).
[0852] 374. The AAV particle of any one of embodiments 368-373, wherein the siRNA duplex ranges from 9 to 36 nucleotides in length (e.g., from 15 to 30 nucleotides in length, from 15 to 25 nucleotides in length, or from 17 to 22 nucleotides in length).
[0853] 375. The AAV particle of any one of embodiments 368-374, wherein the siRNA duplex comprises:
   [0854] (i) a sense strand sequence comprising at least 15 (e.g., at least 16, 17, 18, 19, 20, 21, 22, or 23) contiguous nucleotides differing by no more than 3 (e.g., by no more than 0, 1 or 2) nucleotides from a sense sequence in Table 10; and
   [0855] (ii) an antisense strand sequence comprising at least 15 (e.g., at least 16, 17, 18, 19, 20, 21, 22, or 23) contiguous nucleotides differing by no more than 3 (e.g., by no more than 0, 1 or 2) nucleotides from an antisense sequence in Table 10.
[0856] 376. The AAV particle of any one of embodiments 368-374, wherein the siRNA duplex comprises:
   [0857] (i) a sense strand sequence from Table 10, or a nucleotide at least 80%, 81%, 82%, 83%, 84%, 85%, 86%, 87%, 88%, 89%, 90%, 91%, 92%, 93%, 94%, 95%, 96%, 97%, 98% or 99%, identical to a sense strand sequence in Table 10; and
   [0858] (ii) an antisense strand sequence from Table 10, or a nucleotide at least 80%, 81%, 82%, 83%, 84%, 85%, 86%, 87%, 88%, 89%, 90%, 91%, 92%, 93%, 94%, 95%, 96%, 97%, 98% or 99%, identical to an antisense strand sequence in Table 10.
[0859] 377. The AAV particle of any one of embodiments 368-376, wherein the siRNA duplex is selected from the group consisting of siRNA duplex ID Nos. D-2968, D-2959, or D-4012, or a siRNA duplex at least 80%, 81%, 82%, 83%, 84%, 85%, 86%, 87%, 88%, 89%, 90%, 91%, 92%, 93%, 94%, 95%, 96%, 97%, 98% or 99%, identical to siRNA duplex ID Nos. D-2968, D-2959, or D-4012.
[0860] 378. The AAV particle of any one of embodiments 368-377, wherein the siRNA duplex comprises:
   [0861] (i) a sense strand sequence comprising at least 15 (e.g., at least 16, 17, 18, 19, 20, 21, 22, or 23) contiguous nucleotides differing by no more than 3 (e.g., by no more than 0, 1 or 2) nucleotides from SEQ ID NO: 2525, 2376, or 2381; and
   [0862] (ii) an antisense strand sequence comprising at least 15 (e.g., at least 16, 17, 18, 19, 20, 21, 22, or 23) contiguous nucleotides differing by no more than 3 (e.g., by no more than 0, 1 or 2) nucleotides from SEQ ID NO: 2507, 2365, or 2363.
[0863] 379. The AAV particle of any one of embodiments 368-378, wherein the siRNA duplex comprises:
   [0864] (i) a sense strand sequence comprising SEQ ID NO: 2525, or a nucleotide differing by no more than 3 (e.g., by no more than 0, 1 or 2) nucleotides from SEQ ID NO: 2525, and an antisense strand sequence comprising SEQ ID NO: 2507, or a nucleotide differing by no more than 3 (e.g., by no more than 0, 1 or 2) nucleotides from SEQ ID NO: 2507;
   [0865] (ii) a sense strand sequence comprising SEQ ID NO: 2376, or a nucleotide differing by no more than 3 (e.g., by no more than 0, 1 or 2) nucleotides from SEQ ID NO: 2376, and an antisense strand sequence comprising SEQ ID NO: 2365, or a nucleotide differing by no more than 3 (e.g., by no more than 0, 1 or 2) nucleotides from SEQ ID NO: 2365; and/or
   [0866] (iii) a sense strand sequence comprising SEQ ID NO: 2381, or a nucleotide differing by no more than 3 (e.g., by no more than 0, 1 or 2) nucleotides from SEQ ID NO: 2381, and an antisense strand sequence comprising SEQ ID NO: 2363, or a nucleotide differing by no more than 3 (e.g., by no more than 0, 1 or 2) nucleotides from SEQ ID NO: 2363.
[0867] 380. The AAV particle of embodiment 379, wherein the siRNA duplex comprises:
   [0868] (i) a sense strand sequence comprising SEQ ID NO: 2525, and an antisense strand sequence comprising SEQ ID NO: 2507;
   [0869] (ii) a sense strand sequence comprising SEQ ID NO: 2376, and an antisense strand sequence comprising SEQ ID NO: 2365; and/or
   [0870] (iii) a sense strand sequence comprising SEQ ID NO: 2381, and an antisense strand sequence comprising SEQ ID NO: 2363.
[0871] 381. The AAV particle of embodiment 380, wherein the siRNA duplex comprises a sense strand sequence comprising SEQ ID NO: 2525, and an antisense strand sequence comprising SEQ ID NO: 2507.
[0872] 382. The AAV particle of any one of embodiments 368-381, wherein the sense strand sequence and the antisense strand sequence comprise a region of complementarity, wherein the region of complementarity is between 17-20 nucleotides in length.
[0873] 383. The AAV particle of any one of embodiments 368-382, wherein at least one of the sense strand sequence and the antisense strand sequence comprise a 3′ overhang of at least 1, or 2 nucleotides.
[0874] 384. The AAV particle of any one of embodiments 368-383, wherein sense strand and/or antisense strand are at least 20, 21, or 22 nucleotides in length.
[0875] 385. The AAV particle of any one of embodiments 367-384, wherein the siRNA duplex is encoded by a modulatory polynucleotide comprising:
   [0876] (i) a 5′ flanking region;
   [0877] (ii) a loop region; and/or
   [0878] (iii) a 3′ flanking region.
[0879] 386. The AAV particle of embodiment 384, wherein the modulatory polynucleotide comprises:
   [0880] (i) a 5′ flanking region comprising a nucleotide sequence of SEQ ID NO: 2547, 2548, 2549, or 5014, or a nucleotide sequence substantially identical (e.g., having at least 70%, 75%, 80%, 85%, 90%, 92%, 95%, 97%, 98%, or 99% sequence identity) thereto; or a nucleotide sequence having at least one, two, three, four, five, six, or seven modifications, but no more than ten modifications of SEQ ID NO: 2547, 2548, 2549, or 5014;
   [0881] (ii) a loop region comprising a nucleotide sequence of SEQ ID NO: 2550, 2551, 2552, or 2553, or a nucleotide sequence substantially identical (e.g., having at least 70%, 75%, 80%, 85%, 90%, 92%, 95%, 97%, 98%, or 99% sequence identity) thereto; or a nucleotide sequence having at least one, two, three, or four, modifications, but no more than six modifications of SEQ ID NO: 2550, 2551, 2552, or 2553; and/or
   [0882] (iii) a 3′ flanking region comprising a nucleotide sequence of SEQ ID NO: 2554, 2555, 2556, 2557, or 2558, or a nucleotide sequence substantially identical (e.g., having at least 70%, 75%, 80%, 85%, 90%, 92%, 95%, 97%, 98%, or 99% sequence identity) thereto; or a nucleotide sequence having at least one, two, three, four, five, six, or seven modifications, but no more than ten modifications of SEQ ID NO: 2554, 2555, 2556, 2557, or 2558.
[0883] 387. The AAV particle of any one of embodiments 384-385, wherein:
   [0884] (i) the 5′ flanking region comprises a nucleotide sequence of SEQ ID NO: 2547, or 2549, a nucleotide sequence having at least one, two, three, four, five, six, or seven modifications, but no more than ten modifications of SEQ ID NO: 2547, or 2549;
   [0885] (ii) the loop region comprises a nucleotide sequence of SEQ ID NO: 2550, 2551, or 2552, or a nucleotide sequence having at least one, two, three, or four, modifications, but no more than six modifications of SEQ ID NO: 2550, 2551, or 2552; and/or
   [0886] (iii) 3′ flanking region comprises a nucleotide sequence of SEQ ID NO: 2554, 2555, or 2558, or a nucleotide sequence having at least one, two, three, four, five, six, or seven modifications, but no more than ten modifications of SEQ ID NO: 2554, 2555, or 2558.
[0887] 388. The AAV particle of embodiment 387, wherein:
   [0888] (i) the 5′ flanking region comprises a nucleotide sequence of SEQ ID NO: 2547;
   [0889] (ii) the loop region comprises a nucleotide sequence of SEQ ID NO: 2550; and/or
   [0890] (iii) 3′ flanking region comprises a nucleotide sequence of SEQ ID NO: 2554.
[0891] 389. The AAV particle of any one of embodiments 367-388, wherein the siRNA duplex is encoded by a nucleotide sequence of any one of SEQ ID NOs: 2562, 2579, 5022, 2559, 2560, 2561, 2563, 2564, 2565, 2566, 2567, 2568, 2569, 2570, 2571, 2572, 2573, 2574, 2575, 2576, 2577, 2578 or a nucleotide sequence at least 70% (e.g., at least 75%, 80%, 85%, 90%, 92%, 95%, 97%, 98%, or 99%) identical thereto.
[0892] 390. The AAV particle of any one of embodiments 367-389, wherein the siRNA duplex is encoded by a nucleotide sequence of any one of SEQ ID NOs: 2562, 2579, or 5022, or a nucleotide sequence at least 70% (e.g., at least 75%, 80%, 85%, 90%, 92%, 95%, 97%, 98%, or 99%) identical thereto.
[0893] 391. The AAV particle of any one of embodiments 367-390, wherein the nucleotide sequence encoding the siRNA duplex comprises the nucleotide sequence of SEQ ID NO: 2562 or a nucleotide sequence at least 70% (e.g., at least 75%, 80%, 85%, 90%, 92%, 95%, 97%, 98%, or 99%) identical thereto.
[0894] 392. The isolated AAV particle of any one of the preceding embodiments, which comprises a viral genome comprising a promoter operably linked to the nucleic acid sequence encoding the SOD1 targeting polynucleotide (e.g., a SOD1 targeting RNA agent, e.g., a siRNA duplex)
[0895] 393. The isolated AAV particle of embodiment 392, wherein the promoter is chosen from human elongation factor 1α-subunit (EF1α), cytomegalovirus (CMV) immediate-early enhancer and/or promoter, chicken β-actin (CBA) and its derivative CAG, β glucuronidase (GUSB), or ubiquitin C (UBC), neuron-specific enolase (NSE), platelet-derived growth factor (PDGF), platelet-derived growth factor B-chain (PDGF-β), intercellular adhesion molecule 2 (ICAM-2), synapsin (Syn), methyl-CpG binding protein 2 (MeCP2), Ca2+/calmodulin-dependent protein kinase II (CaMKII), metabotropic glutamate receptor 2 (mGluR2), neurofilament light (NFL) or heavy (NFH), β-globin minigene nβ2, preproenkephalin (PPE), enkephalin (Enk) and excitatory amino acid transporter 2 (EAAT2), glial fibrillary acidic protein (GFAP), myelin basic protein (MBP), phosphoglycerate kinase (PGK), insulin, a cardiovascular promoter (e.g., αMHC, cTnT, and CMV-MLC2k), a liver promoter (e.g., hAAT, TBG), a skeletal muscle promoter (e.g., desmin, MCK, C512) or a fragment, e.g., a truncation, or a functional variant thereof.
[0896] 394. The isolated AAV particle of embodiment 393, wherein the promoter is an EF-la promoter variant, e.g., a truncated EF-la promoter, a CBA promoter variant, e.g., a truncated CBA promoter, an insulin promoter variant, e.g., a truncated insulin promoter, or a SYN promoter variant, e.g., a truncated SYN promoter.
[0897] 395. The isolated AAV particle of any one of embodiments 392-394, wherein the promoter comprises the nucleotide sequence of any one of SEQ ID NOs: 4000-4026, a nucleotide sequence comprising at least one, two, or three but no more than four modifications, e.g., substitutions (e.g., conservative substitutions), insertions, or deletions, relative to the nucleotide sequence of SEQ ID NOs: 4000-4026, or a nucleotide sequence with at least 80% (e.g., 85%, 90%, 95%, 96%, 97%, 98%, or 99%) sequence identity to any one of SEQ ID NOs: 4000-4026.
[0898] 396. The isolated AAV particle of embodiment 392, wherein the promoter is a H1 promoter comprising SEQ ID NO: 128, or a nucleotide sequence with at least 80% (e.g., 85%, 90%, 95%, 96%, 97%, 98%, or 99%) sequence identity to SEQ ID NO: 128.
[0899] 397. The isolated AAV particle of any one of embodiments 392-396, wherein the viral genome further comprises a first exon, a second exon, or both a first exon and second exon.
[0900] 398. The isolated AAV particle of any one of embodiments 397, wherein the first or second exon comprises the nucleotide sequence of any one of SEQ ID NO: 4045-4048, a nucleotide sequence comprising at least one, two, or three but no more than four modifications, e.g., substitutions, insertions, or deletions, relative to the nucleotide sequence of any one of SEQ ID NO: 4045-4048, or a nucleotide sequence with at least 80% (e.g., 85%, 90%, 95%, 96%, 97%, 98%, or 99%) sequence identity to any one of SEQ ID NO: 4045-4048.
[0901] 399. The isolated AAV particle of any one of embodiments 397 or 398, wherein the viral genome comprises both a first exon and a second exon, wherein:
   [0902] (a) the first exon comprises the nucleotide sequence of SEQ ID NO: 4045 or 4046, a nucleotide sequence comprising at least one, two, or three but no more than four modifications, e.g., substitutions, insertions, or deletions, relative to the nucleotide sequence of SEQ ID NO: 4045 or 4046, or a nucleotide sequence with at least 80% (e.g., 85%, 90%, 95%, 96%, 97%, 98%, or 99%) sequence identity to SEQ ID NO: 4045 or 4046; and
   [0903] (b) the second exon comprises the nucleotide sequence of SEQ ID NO: 4047 or 4048, a nucleotide sequence comprising at least one, two, or three but no more than four modifications, e.g., substitutions, insertions, or deletions, relative to the nucleotide sequence of SEQ ID NO: 4047 or 4048, or a nucleotide sequence with at least 80% (e.g., 85%, 90%, 95%, 96%, 97%, 98%, or 99%) sequence identity to SEQ ID NO: 4047 or 4048.
[0904] 400. The isolated AAV particle of any one of embodiments 397-399, wherein the first exon, second exon, or both are codon optimized.
[0905] 401. The isolated AAV particle of any one of embodiments 397-400, wherein one or more or all of the CpG sequences in the first exon, second exon, or both are depleted.
[0906] 402. The isolated AAV particle of any one of embodiments 392-401, wherein the viral genome further comprises an intron.
[0907] 403. The isolated AAV particle of embodiment 402, wherein the intron is located 3′ relative to the (a) 5′ITR, (b) promoter, and/or (c) first exon.
[0908] 404. The isolated AAV particle of embodiment 402 or 403, wherein the intron is located 5′ relative to the (a) second exon, (b) modulatory polynucleotide, (c) poly A signal sequence, and/or (d) 3′ITR.
[0909] 405. The isolated AAV particle of any one of embodiments 392-404, wherein the viral genome comprises a first exon, an intron, and a second exon, wherein the intron is located 3′ relative to the first exon and 5′ relative to the second exon.
[0910] 406. The isolated AAV particle of any one of embodiments 402-405, wherein the intron comprises the nucleotide sequence of SEQ ID NO: 4044, a nucleotide sequence comprising at least one, two, or three but no more than four modifications, e.g., substitutions, insertions, or deletions, relative to the nucleotide sequence of SEQ ID NO: 4044, or a nucleotide sequence with at least 80% (e.g., 85%, 90%, 95%, 96%, 97%, 98%, or 99%) sequence identity to SEQ ID NO: 4044.
[0911] 407. The isolated AAV particle of any one of embodiments 392-406, wherein the viral genome comprises a first exon, an intron, and second exon (“exon-intron-exon cassette”).
[0912] 408. The isolated AAV particle of embodiment 407, wherein the exon-intron-exon cassette comprises the nucleotide sequence of SEQ ID NO: 4042 or 4043, a nucleotide sequence comprising at least one, two, or three but no more than four modifications, e.g., substitutions, insertions, or deletions, relative to the nucleotide sequence of SEQ ID NO: 4042 or 4043, or a nucleotide sequence with at least 80% (e.g., 85%, 90%, 95%, 96%, 97%, 98%, or 99%) sequence identity to SEQ ID NO: 4042 or 4043.
[0913] 409. The isolated AAV particle of embodiment 407 or 408, wherein the exon-intron-exon cassette is positioned 3′ relative to the promoter, and 5′ relative to the nucleotide sequence encoding the modulatory polynucleotide (e.g., a SOD1 targeting RNA agent, e.g., a siRNA duplex).
[0914] 410. The isolated AAV particle of any one of embodiments 407-409, wherein the nucleotide sequence encoding the modulatory polynucleotide (e.g., a SOD1 targeting RNA agent, e.g., a siRNA duplex) is located within (e.g., inserted into) the intron of the exon-intron-exon cassette.
[0915] 411. The isolated AAV particle of any one of embodiments 407-410, wherein the nucleotide sequence encoding the modulatory polynucleotide (e.g., a SOD1 targeting RNA agent, e.g., a siRNA duplex) replaces a portion or all of the intron in the exon-intron-exon cassette.
[0916] 412. The isolated AAV particle of any one of embodiments 392-411, wherein the viral genome further comprises a polyA signal sequence.
[0917] 413. The isolated AAV particle of embodiment 412, wherein the polyA signal sequence comprises SEQ ID NO: 129 or 4027, or a nucleotide sequence with at least 80% (e.g., 85%, 90%, 95%, 96%, 97%, 98%, or 99%) sequence identity to SEQ ID NO: 129 or 4027.
[0918] 414. The isolated AAV particle of any one of embodiments 392-413, wherein the viral genome further comprises an inverted terminal repeat (ITR) sequence.
[0919] 415. The isolated AAV particle of any one of embodiments 392-414, wherein the viral genome comprises an ITR sequence positioned 5′ relative to the encoded SOD1 targeting polynucleotide.
[0920] 416. The isolated AAV particle of any one of embodiments 392-415, wherein the viral genome comprises an ITR sequence positioned 3′ relative to the encoded SOD1 targeting polynucleotide.
[0921] 417. The isolated AAV particle of any one of embodiments 392-416, wherein the viral genome comprises an ITR sequence positioned 5′ relative to the encoded payload and an ITR sequence positioned 3′ relative to the encoded SOD1 targeting polynucleotide.
[0922] 418. The isolated AAV particle of embodiment 417, wherein the ITR sequence positioned 5′ relative to the encoded payload and an ITR sequence positioned 3′ relative to the payload, comprise SEQ ID NOs: 126, or 130, or a nucleotide sequence with at least 80% (e.g., 85%, 90%, 95%, 96%, 97%, 98%, or 99%) sequence identity thereto.
[0923] 419. The isolated AAV particle of any one of embodiments 392-418, wherein the viral genome further comprises an enhancer, a Kozak sequence, an intron region, and/or an exon region.
[0924] 420. The isolated AAV particle of any one of embodiments 392-419, wherein the viral genome comprises, from 5′ to 3′:
   [0925] (a) a 5′ ITR, e.g., a 5′ITR comprising the nucleotide sequence of SEQ ID NO: 126 or 130 or variant thereof,
   [0926] (b) a promoter, e.g., a promoter comprising the nucleotide sequence of any one of SEQ ID NOs: 4000-4026 or variant thereof,
   [0927] (c) an exon, e.g., an exon comprising the nucleotide sequence of any one of SEQ ID NOs: 4045-4048 or variant thereof,
   [0928] (d) a nucleotide sequence encoding a modulatory polynucleotide (e.g., a SOD1 targeting RNA agent, e.g., a siRNA duplex), e.g., a modulatory polynucleotide comprising the nucleotide sequence of any one of SEQ ID NOs: 2559-2579 and 5022 or variant thereof,
   [0929] (e) a poly A signal sequence, e.g., a poly A signal sequence comprising the nucleotide sequence of SEQ ID NO: 129 or 4027 or variant thereof, and
   [0930] (f) a 3′ITR, e.g., a 3′ITR comprising the nucleotide sequence of SEQ ID NO: 126 or 130 or variant thereof,
   [0931] wherein the variant of any of (a)-(f) comprises a sequence differing by no more than 15, 14, 13, 12, 11, 10, 9, 8, 7, 6, 5, 4, 3, 2 or 1 nucleotides, e.g., substitutions, insertions, or deletions, relative to the reference sequence, or a sequence with at least 70%, 75%, 80%, 85%, 90%, 95%, 99% or 100% identity, relative to the reference sequence, e.g., wherein the reference sequence is a wild-type sequence.
[0932] 421. The isolated AAV particle of any one of embodiments 392-420, wherein the viral genome comprises, from 5′ to 3′:
   [0933] (a) a 5′ ITR, e.g., a 5′ITR comprising the nucleotide sequence of SEQ ID NO: 126 or 130 or variant thereof,
   [0934] (b) a promoter, e.g., a promoter comprising the nucleotide sequence of any one of SEQ ID NOs: 4000-4026 or variant thereof,
   [0935] (c) a first exon, e.g., a first exon comprising the nucleotide sequence of any one of SEQ ID NOs: 4045-4048 or variant thereof,
   [0936] (d) an intron, e.g., an intron comprising the nucleotide sequence of SEQ ID NO: 4044 or variant thereof,
   [0937] (e) a nucleotide sequence encoding a modulatory polynucleotide (e.g., a SOD1 targeting RNA agent, e.g., a siRNA duplex), e.g., a SOD1 targeting polynucleotide comprising the nucleotide sequence of any one of SEQ ID NOs: 2559-2579 and 5022 or variant thereof,
   [0938] (f) a poly A signal sequence, e.g., a poly A signal sequence comprising the nucleotide sequence of SEQ ID NO: 129 or 4027 or variant thereof, and
   [0939] (g) a 3′ITR, e.g., a 3′ITR comprising the nucleotide sequence of SEQ ID NO: 126 or 130 or variant thereof,
   [0940] wherein the variant comprises a sequence differing by no more than 15, 14, 13, 12, 11, 10, 9, 8, 7, 6, 5, 4, 3, 2 or 1 nucleotides, e.g., substitutions, insertions, or deletions, relative to the reference sequence, or a sequence with at least 70%, 75%, 80%, 85%, 90%, 95%, 99% or 100% identity relative to the reference sequence, e.g., wherein the reference sequence is a wild-type sequence.
[0941] 422. The isolated AAV particle of any one of embodiments 392-421, wherein the viral genome comprises, from 5′ to 3′:
   [0942] (a) a 5′ ITR, e.g., a 5′ITR comprising the nucleotide sequence of SEQ ID NO: 126 or 130 or variant thereof,
   [0943] (b) a promoter, e.g., a promoter comprising the nucleotide sequence of any one of SEQ ID NOs: 4000-4026 or variant thereof,
   [0944] (c) a first exon, e.g., a first exon comprising the nucleotide sequence of any one of SEQ ID NOs: 4045-4048 or variant thereof,
   [0945] (d) an intron, e.g., an intron comprising the nucleotide sequence of SEQ ID NO: 4044 or variant thereof,
   [0946] (e) a second exon, e.g., a second exon comprising the nucleotide sequence of any one of SEQ ID NOs: 4045-4048 or variant thereof,
   [0947] (f) a nucleotide sequence encoding a modulatory polynucleotide (e.g., a SOD1 targeting RNA agent, e.g., a siRNA duplex), e.g., a SOD1 targeting polynucleotide comprising the nucleotide sequence of any one of SEQ ID NOs: 2559-2579 and 5022 or variant thereof,
   [0948] (g) a poly A signal sequence, e.g., a poly A signal sequence comprising the nucleotide sequence of SEQ ID NO: 129 or 4027 or variant thereof, and
   [0949] (h) a 3′ITR, e.g., a 3′ITR comprising the nucleotide sequence of SEQ ID NO: 126 or 130 or variant thereof,
   [0950] wherein the variant comprises a sequence differing by no more than 15, 14, 13, 12, 11, 10, 9, 8, 7, 6, 5, 4, 3, 2 or 1 nucleotides, e.g., substitutions, insertions, or deletions, relative to the reference sequence, or a sequence with at least 70%, 75%, 80%, 85%, 90%, 95%, 99% or 100% identity relative to the reference sequence, e.g., wherein the reference sequence is a wild-type sequence.
[0951] 423. The isolated AAV particle of any one of embodiments 392-422, wherein the viral genome comprises the nucleotide sequence of any one of SEQ ID NOs: 4028-4041, a nucleotide sequence differing by no more than 15, 14, 13, 12, 11, 10, 9, 8, 7, 6, 5, 4, 3, 2 or 1 nucleotides, e.g., substitutions, insertions, or deletions, relative to any one of SEQ ID NOs: 4028-4041, or a nucleotide sequence with at least 70%, 75%, 80%, 85%, 90%, 95%, 99% or 100% identity to any one of SEQ ID NOs: 4028-4041.
[0952] 424. The isolated AAV particle of any one of embodiments 392-423, wherein the viral genome further comprises a nucleotide sequence encoding a miR binding site, e.g., a miR binding site that modulates, e.g., reduces, expression of the SOD1 targeting polynucleotide encoded by the viral genome in a cell or tissue where the corresponding miRNA is expressed.
[0953] 425. The isolated AAV particle of embodiment 424, wherein the encoded miRNA binding site is complementary, e.g., fully complementary or partially complementary, to a miRNA expressed in a cell or tissue of the DRG, liver, heart, hematopoietic, or a combination thereof.
[0954] 426. The isolated AAV particle of embodiment 425 or 426, wherein the encoded miR binding site modulates, e.g., reduces, expression of the encoded SOD1 targeting polynucleotide in a cell or tissue of the DRG, liver, heart, hematopoietic lineage, or a combination thereof.
[0955] 427. The isolated AAV particle of any one of embodiments 424-426, wherein the viral genome comprises at least 1-5 copies of the encoded miR binding site, e.g., at least 1, 2, 3, 4, or 5 copies.
[0956] 428. The isolated AAV particle of any one of embodiments 424-427, wherein the viral genome comprises at least 3 copies of an encoded miR binding sites, optionally wherein all three copies comprise the same miR binding site, or at least one, two, three, or all of the copies comprise a different miR binding site.
[0957] 429. The isolated AAV particle of embodiment 428, wherein the at least 3 copies of the encoded miR binding sites are continuous (e.g., not separated by a spacer), or are separated by a spacer, optionally wherein the spacer comprises the nucleotide sequence GATAGTTA, or a nucleotide sequence having at least one, two, or three modifications, e.g., substitutions (e.g., conservative substitutions), but no more than four modifications, e.g., substitutions (e.g., conservative substitutions), relative to GATAGTTA.
[0958] 430. The isolated AAV particle of any one of embodiments 324-329, wherein the viral genome comprises at least 4 copies of an encoded miR binding site, optionally wherein all four copies comprise the same miR binding site, or at least one, two, three, or all of the copies comprise a different miR binding site.
[0959] 431. The isolated AAV particle of embodiment 430, wherein the at least 4 copies of the encoded miR binding sites are continuous (e.g., not separated by a spacer), or are separated by a spacer, optionally wherein the spacer comprises the nucleotide sequence GATAGTTA, or a nucleotide sequence having at least one, two, or three modifications, e.g., substitutions (e.g., conservative substitutions), but no more than four modifications, e.g., substitutions (e.g., conservative substitutions), relative to GATAGTTA.
[0960] 432. The isolated AAV particle of any one of embodiments 424-431, wherein the encoded miR binding site comprises a miR122 binding site, a miR183 binding site, a miR-1 binding site, a miR-142-3p, or a combination thereof, optionally wherein:
   [0961] (i) the encoded miR122 binding site comprises the nucleotide sequence of SEQ ID NO: 1865, or a nucleotide sequence substantially identical (e.g., having at least 70%, 75%, 80%, 85%, 90%, 92%, 95%, 97%, 98%, or 99% sequence identity) thereto; or a nucleotide sequence having at least one, two, three, four, five, six, or seven modifications, e.g., substitutions (e.g., conservative substitutions), but no more than ten modifications, e.g., substitutions (e.g., conservative substitutions), relative to SEQ ID NO: 3672;
   [0962] (ii) the encoded miR183 binding site comprises the nucleotide sequence of SEQ ID NO: 1847, or a nucleotide sequence substantially identical (e.g., having at least 70%, 75%, 80%, 85%, 90%, 92%, 95%, 97%, 98%, or 99% sequence identity) thereto; or a nucleotide sequence having at least one, two, three, four, five, six, or seven modifications, e.g., substitutions (e.g., conservative substitutions), but no more than ten modifications, e.g., substitutions (e.g., conservative substitutions), relative to SEQ ID NO: 3675;
   [0963] (iii) the encoded miR-1 binding site comprises the nucleotide sequence of SEQ ID NO: 4679, or a nucleotide sequence substantially identical (e.g., having at least 70%, 75%, 80%, 85%, 90%, 92%, 95%, 97%, 98%, or 99% sequence identity) thereto; or a nucleotide sequence having at least one, two, three, four, five, six, or seven modifications, e.g., substitutions (e.g., conservative substitutions), but no more than ten modifications, e.g., substitutions (e.g., conservative substitutions), relative to SEQ ID NO: 4679; and/or
   [0964] (iv) the encoded miR-142-3p binding site comprises the nucleotide sequence of SEQ ID NO: 1869, or a nucleotide sequence substantially identical (e.g., having at least 70%, 75%, 80%, 85%, 90%, 92%, 95%, 97%, 98%, or 99% sequence identity) thereto; or a nucleotide sequence having at least one, two, three, four, five, six, or seven modifications, e.g., substitutions (e.g., conservative substitutions), but no more than ten modifications, e.g., substitutions (e.g., conservative substitutions), relative to SEQ ID NO: 1869.
[0965] 433. The isolated AAV particle of any one of embodiments 392-432, wherein the viral genome comprises an encoded miR122 binding site.
[0966] 434. The isolated AAV particle of any one of embodiments 392-433, wherein the viral genome comprises at least 1-5 copies, e.g., 1, 2, or 3 copies of a miR122 binding site, optionally wherein each copy is continuous (e.g., not separated by a spacer), or each copy is separated by a spacer, optionally wherein the spacer comprises the nucleotide sequence GATAGTTA, or a nucleotide sequence having at least one, two, or three modifications, e.g., substitutions (e.g., conservative substitutions), but no more than four modifications, e.g., substitutions (e.g., conservative substitutions), relative to GATAGTTA.
[0967] 435. The isolated AAV particle of any one of embodiments 432-434, wherein the encoded miR122 binding site comprises the nucleotide sequence of SEQ ID NO: 1865, or a nucleotide sequence substantially identical (e.g., having at least 70%, 75%, 80%, 85%, 90%, 92%, 95%, 97%, 98%, or 99% sequence identity) thereto; or a nucleotide sequence having at least one, two, three, four, five, six, or seven modifications, e.g., substitutions (e.g., conservative substitutions), but no more than ten modifications, e.g., substitutions (e.g., conservative substitutions), relative to SEQ ID NO: 1865.
[0968] 436. The isolated AAV particle of any one of embodiments 392-435, wherein the viral genome comprises:
[0969] (A) (i) a first encoded miR122 binding site comprising the nucleotide sequence of SEQ ID NO: 1865, or a nucleotide sequence substantially identical (e.g., having at least 70%, 75%, 80%, 85%, 90%, 92%, 95%, 97%, 98%, or 99% sequence identity) thereto; or a nucleotide sequence having at least one, two, three, four, five, six, or seven modifications, e.g., substitutions (e.g., conservative substitutions), but no more than ten modifications, e.g., substitutions (e.g., conservative substitutions), relative to SEQ ID NO: 1865;
   [0970] (ii) a first spacer comprising the nucleotide sequence SEQ ID NO: 1848, or a nucleotide sequence having at least one, two, or three modifications, e.g., substitutions (e.g., conservative substitutions), but no more than four modifications, e.g., substitutions (e.g., conservative substitutions), relative to GATAGTTA; and
   [0971] (iii) a second encoded miR122 binding site comprising the nucleotide sequence of SEQ ID NO: 1865, or a nucleotide sequence substantially identical (e.g., having at least 70%, 75%, 80%, 85%, 90%, 92%, 95%, 97%, 98%, or 99% sequence identity) thereto; or a nucleotide sequence having at least one, two, three, four, five, six, or seven modifications, e.g., substitutions (e.g., conservative substitutions), but no more than ten modifications, e.g., substitutions (e.g., conservative substitutions), relative to SEQ ID NO: 1865; or
[0972] (B) (i) a first encoded miR122 binding site comprising the nucleotide sequence of SEQ ID NO: 1865, or a nucleotide sequence substantially identical (e.g., having at least 70%, 75%, 80%, 85%, 90%, 92%, 95%, 97%, 98%, or 99% sequence identity) thereto; or a nucleotide sequence having at least one, two, three, four, five, six, or seven modifications, e.g., substitutions (e.g., conservative substitutions), but no more than ten modifications, e.g., substitutions (e.g., conservative substitutions), relative to SEQ ID NO: 1865;
   [0973] (ii) a first spacer comprising the nucleotide sequence GATAGTTA, or a nucleotide sequence having at least one, two, or three modifications, e.g., substitutions (e.g., conservative substitutions), but no more than four modifications, e.g., substitutions (e.g., conservative substitutions), relative to SEQ ID NO: 1848;
   [0974] (iii) a second encoded miR122 binding site comprising the nucleotide sequence of SEQ ID NO: 1865, or a nucleotide sequence substantially identical (e.g., having at least 70%, 75%, 80%, 85%, 90%, 92%, 95%, 97%, 98%, or 99% sequence identity) thereto; or a nucleotide sequence having at least one, two, three, four, five, six, or seven modifications, e.g., substitutions (e.g., conservative substitutions), but no more than ten modifications, e.g., substitutions (e.g., conservative substitutions), relative to SEQ ID NO: 1865;
   [0975] (iv) a second spacer comprising the nucleotide sequence of GATAGTTA, or a nucleotide sequence having at least one, two, or three modifications, e.g., substitutions (e.g., conservative substitutions), but no more than four modifications, e.g., substitutions (e.g., conservative substitutions), relative to GATAGTTA; and
   [0976] (v) a third encoded miR122 binding site comprising the nucleotide sequence of SEQ ID NO: 1865, or a nucleotide sequence substantially identical (e.g., having at least 70%, 75%, 80%, 85%, 90%, 92%, 95%, 97%, 98%, or 99% sequence identity) thereto; or a nucleotide sequence having at least one, two, three, four, five, six, or seven modifications, e.g., substitutions (e.g., conservative substitutions), but no more than ten modifications, e.g., substitutions (e.g., conservative substitutions), relative to SEQ ID NO: 1865.
[0977] 437. The isolated AAV particle of any one of embodiments 392-436, wherein the viral genome comprises an encoded miR183 binding site.
[0978] 438. The isolated AAV particle of any one of embodiments 392-437, wherein the viral genome comprises at least 1-5 copies, e.g., 1, 2, or 3 copies of a miR183 binding site, optionally wherein each copy is continuous (e.g., not separated by a spacer), or each copy is separated by a spacer, optionally wherein the spacer comprises the nucleotide sequence GATAGTTA, or a nucleotide sequence having at least one, two, or three modifications, e.g., substitutions (e.g., conservative substitutions), but no more than four modifications, e.g., substitutions (e.g., conservative substitutions), relative to GATAGTTA.
[0979] 439. The isolated AAV particle of embodiment 438, wherein the encoded miR183 binding site comprises the nucleotide sequence of SEQ ID NO: 1847, or a nucleotide sequence substantially identical (e.g., having at least 70%, 75%, 80%, 85%, 90%, 92%, 95%, 97%, 98%, or 99% sequence identity) thereto; or a nucleotide sequence having at least one, two, three, four, five, six, or seven modifications, e.g., substitutions (e.g., conservative substitutions), but no more than ten modifications, e.g., substitutions (e.g., conservative substitutions), relative to SEQ ID NO: 1847.
[0980] 440. The isolated AAV particle of any one of embodiments 392-439, wherein the viral genome comprises:
[0981] (A) (i) a first encoded miR183 binding site comprising the nucleotide sequence of SEQ ID NO: 1847, or a nucleotide sequence substantially identical (e.g., having at least 70%, 75%, 80%, 85%, 90%, 92%, 95%, 97%, 98%, or 99% sequence identity) thereto; or a nucleotide sequence having at least one, two, three, four, five, six, or seven modifications, e.g., substitutions (e.g., conservative substitutions), but no more than ten modifications, e.g., substitutions (e.g., conservative substitutions), relative to SEQ ID NO: 1847;
   [0982] (ii) a first spacer comprising the nucleotide sequence GATAGTTA, or a nucleotide sequence having at least one, two, or three modifications, e.g., substitutions (e.g., conservative substitutions), but no more than four modifications, e.g., substitutions (e.g., conservative substitutions), relative to GATAGTTA; and
   [0983] (iii) a second encoded miR183 binding site comprising the nucleotide sequence of SEQ ID NO: 1847, or a nucleotide sequence substantially identical (e.g., having at least 70%, 75%, 80%, 85%, 90%, 92%, 95%, 97%, 98%, or 99% sequence identity) thereto; or a nucleotide sequence having at least one, two, three, four, five, six, or seven modifications, e.g., substitutions (e.g., conservative substitutions), but no more than ten modifications, e.g., substitutions (e.g., conservative substitutions), relative to SEQ ID NO: 1847; or
[0984] (B) (i) a first encoded miR183 binding site comprising the nucleotide sequence of SEQ ID NO: 1847, or a nucleotide sequence substantially identical (e.g., having at least 70%, 75%, 80%, 85%, 90%, 92%, 95%, 97%, 98%, or 99% sequence identity) thereto; or a nucleotide sequence having at least one, two, three, four, five, six, or seven modifications, e.g., substitutions (e.g., conservative substitutions), but no more than ten modifications, e.g., substitutions (e.g., conservative substitutions), relative to SEQ ID NO: 1847;
   [0985] (ii) a first spacer comprising the nucleotide sequence GATAGTTA, or a nucleotide sequence having at least one, two, or three modifications, e.g., substitutions (e.g., conservative substitutions), but no more than four modifications, e.g., substitutions (e.g., conservative substitutions), relative to GATAGTTA;
   [0986] (iii) a second encoded miR183 binding site comprising the nucleotide sequence of SEQ ID NO: 1847, or a nucleotide sequence substantially identical (e.g., having at least 70%, 75%, 80%, 85%, 90%, 92%, 95%, 97%, 98%, or 99% sequence identity) thereto; or a nucleotide sequence having at least one, two, three, four, five, six, or seven modifications, e.g., substitutions (e.g., conservative substitutions), but no more than ten modifications, e.g., substitutions (e.g., conservative substitutions), relative to SEQ ID NO: 1847;
   [0987] (iv) a second spacer comprising the nucleotide sequence of GATAGTTA, or a nucleotide sequence having at least one, two, or three modifications, e.g., substitutions (e.g., conservative substitutions), but no more than four modifications, e.g., substitutions (e.g., conservative substitutions), relative to GATAGTTA; and
   [0988] (v) a third encoded miR183 binding site comprising the nucleotide sequence of SEQ ID NO: 1847, or a nucleotide sequence substantially identical (e.g., having at least 70%, 75%, 80%, 85%, 90%, 92%, 95%, 97%, 98%, or 99% sequence identity) thereto; or a nucleotide sequence having at least one, two, three, four, five, six, or seven modifications, e.g., substitutions (e.g., conservative substitutions), but no more than ten modifications, e.g., substitutions (e.g., conservative substitutions), relative to SEQ ID NO: 1847.
[0989] 441. The isolated AAV particle of any one of embodiments 392-340, wherein the viral genome comprises an encoded miR122 binding site and a miR-1 binding site.
[0990] 442. The isolated AAV particle of any one of embodiments 392-441, wherein the viral genome is single stranded or self-complementary.
[0991] 443. The isolated AAV particle of any one of embodiments 392-442, wherein the viral genome further comprises a nucleotide sequence encoding a Rep protein, e.g., a non-structural protein, wherein the Rep protein comprises a Rep78 protein, a Rep68, Rep52 protein, and/or a Rep40 protein.
[0992] 444. The isolated AAV particle of embodiment 443, wherein the Rep78 protein, the Rep68 protein, the Rep52 protein, and/or the Rep40 protein are encoded by at least one Rep gene.
[0993] 445. A cell, e.g., a host cell, comprising the AAV particle of any one of the preceding embodiments.
[0994] 446. The cell of embodiment 445, wherein the cell is a mammalian cell or an insect cell.
[0995] 447. The cell of embodiment 445 or 446, wherein the cell is a cell of a brain region or a spinal cord region, optionally a cell of the frontal cortex, sensory cortex, motor cortex, caudate, dentate nucleus, cerebellar cortex, cerebral cortex, brain stem, hippocampus, thalamus, putamen, cervical spinal cord region, thoracic spinal cord region, and/or lumbar spinal cord region.
[0996] 448. The cell of any one of embodiments 445-447, wherein the cell is a neuron, a sensory neuron, a motor neuron, an astrocyte, or a glial cell.
[0997] 449. A method of making the AAV particle of any one of embodiments 1-444, comprising:
   [0998] (i) providing a host cell comprising a viral genome; and
   [0999] (ii) incubating the host cell under conditions suitable to enclose the viral genome in an AAV capsid variant, e.g., an AAV capsid variant described herein;
   [1000] thereby making the AAV particle.
[1001] 450. The method of embodiment 449, further comprising, prior to step (i), introducing a first nucleic acid molecule comprising the viral genome into the host cell.
[1002] 451. The method of embodiment 449 or 450, wherein the host cell comprises a second nucleic acid encoding the capsid variant.
[1003] 452. The method of embodiment 451, wherein the second nucleic acid molecule is introduced into the host cell prior to, concurrently with, or after the first nucleic acid molecule.
[1004] 453. A pharmaceutical composition comprising the AAV particle of any one of embodiments 1-444, and a pharmaceutically acceptable excipient.
[1005] 454. A method of delivering a payload to a cell or tissue (e.g., a CNS cell or a CNS tissue), comprising administering an effective amount of the pharmaceutical composition of embodiment 453, or the AAV particle of any one of embodiments 1-444.
[1006] 455. The method of embodiment 454, wherein the cell is a cell a cell of a brain region or a spinal cord region, optionally a cell of the frontal cortex, sensory cortex, motor cortex, caudate, dentate nucleus, cerebellar cortex, cerebral cortex, brain stem, hippocampus, thalamus, putamen, cervical spinal cord region, thoracic spinal cord region, and/or lumbar spinal cord region.
[1007] 456. The method of embodiment 454 or 455, wherein the cell is a neuron, a sensory neuron, a motor neuron, or an astrocyte.
[1008] 457. The method of any one of embodiments 454-456, wherein the cell or tissue is within a subject.
[1009] 458. The method of embodiment 457, wherein the subject has, has been diagnosed with having, or is at risk of having a neurological, e.g., a neurodegenerative disorder.
[1010] 459. The method of embodiment 457 or 458, wherein the subject has, has been diagnosed with having, or is at risk of having a disease associated with SOD1 expression or activity.
[1011] 460. The method of any one of embodiments 457-459, wherein the subject has, has been diagnosed with having, or is at risk of having a disease associated with SOD1 expression or activity.
[1012] 461. The method of any one of embodiments 457-460, wherein the subject has, has been diagnosed with having, or is at risk of having amyotrophic lateral sclerosis.
[1013] 462. A method of treating a subject having or diagnosed with having a neurological disorder, e.g., a neurodegenerative disorder, comprising administering to the subject an effective amount of the pharmaceutical composition of embodiment 453, or the AAV particle of any one of embodiments 1-444.
[1014] 463. A method of treating a subject having or diagnosed with having a disease related to expression of SOD1, comprising administering to the subject an effective amount of the pharmaceutical composition of embodiment 453, or the AAV particle of any one of embodiments 1-444.
[1015] 464. A method of treating a subject having or diagnosed with a disease associated with SOD1 expression or activity, comprising administering to the subject an effective amount of the pharmaceutical composition of embodiment 453, or the AAV particle of any one of embodiments 1-444.
[1016] 465. The method of any one of embodiments 458-464, wherein the neurological disorder, neurodegenerative disorder, or disease associated with SOD1 expression comprises amyotrophic lateral sclerosis (ALS).
[1017] 466. The method embodiment 465, wherein the ALS is:
   [1018] (i) familial ALS;
   [1019] (ii) sporadic ALS;
   [1020] (iii) early stage ALS;
   [1021] (iv) middle stage ALS; and/or
   [1022] (v) late stage ALS.
[1023] 467. The method of any one of embodiments 462-466, where treating comprises prevention of progression of the disease or disorder in the subject.
[1024] 468. The method of any one of embodiments 457-467, wherein the subject is a human.
[1025] 469. The method of any one of embodiments 465-468, wherein treatment comprises amelioration of a symptom of ALS in the subject.
[1026] 470. The method of embodiment 469, wherein the symptom comprises motor neuron degeneration, muscle weakness, stiffness of muscles, muscle atrophy, muscle stiffness, fasciculation development, frontotemporal dementia, slurred speech, difficulty breathing, or a combination thereof.
[1027] 471. The method of any one of embodiments 457-470, wherein the AAV particle is administered to the subject intravenously, via intra-cisterna magna injection (ICM), intracerebrally, intrathecally, intracerebroventricularly, via intraparenchymal administration, or intramuscularly.
[1028] 472. The method of any one of embodiments 457-471, wherein the AAV particle is administered to the subject via focused ultrasound (FUS), e.g., coupled with the intravenous administration of microbubbles (FUS-MB), or MRI-guided FUS coupled with intravenous administration.
[1029] 473. The method of any one of embodiments 457-472, wherein the AAV particle is administered to the subject intravenously.
[1030] 474. The method of any one of embodiments 454-473, wherein administration of the AAV particle results in a decreased presence, level, and/or activity of a gene, mRNA, protein, or combination thereof.
[1031] 475. The method of any one of embodiments 454-474, wherein administration of the AAV particle results in an increased presence, level, and/or activity of a gene, mRNA, protein, or a combination thereof.
[1032] 476. The pharmaceutical composition of embodiment 453, or the AAV particle of any one of embodiments 1-444, for use in a method of delivering a payload to a cell or tissue.
[1033] 477. The pharmaceutical composition of embodiment 453, or the AAV particle of any one of embodiments 1-444, for use in a method of treating a neurological disorder, a neurodegenerative disorder, a disease associated with SOD1 expression or activity.
[1034] 478. The pharmaceutical composition of embodiment 453, or the AAV particle of any one of embodiments 1-444, for use in the manufacture of a medicament.
[1035] 479. Use of the pharmaceutical composition of embodiment 453, or the AAV particle of any one of embodiments 1-444, in the manufacture of a medicament.
[1036] 480. Use of the pharmaceutical composition of embodiment 453, or the AAV particle of any one of embodiments 1-444, in the manufacture of a medicament for treating a neurological disorder, a neurodegenerative disorder, a disease associated with SOD1 expression or activity.

[1037] The details of various aspects or embodiments of the present disclosure are set forth below. Other features, objects, and advantages of the disclosure will be apparent from the description and the claims. In the description, the singular forms also include the plural unless the context clearly dictates otherwise. Unless defined otherwise, all technical and scientific terms used herein have the same meaning as commonly understood by one of ordinary skill in the art in the field of this disclosure. In the case of conflict, the present description will control.

### BRIEF DESCRIPTION OF THE DRAWINGS

[1038] The foregoing and other objects, features and advantages will be apparent from the following description of particular embodiments of the disclosure, as illustrated in the accompanying drawings. The drawings are not necessarily to scale, emphasis instead being placed upon illustrating the principles of various embodiments of the disclosure.

[1039] FIGS. 1A-1D show the expression of SOD1 mRNA from motor neuron pools in the lumbar L2 spinal cord. FIG. 1A is a graphical representation of the expression of SOD1 mRNA using Laser Capture Microdissection. Purified total RNA was reverse transcribed, cDNA pre-amplified, and quantified by qPCR with Taqman probe sets homologous to SOD1 and reference XPNPEP1 mRNA. FIG. 1B is an image of the hemi-sected cross-section of L2 spinal cord. FIG. 1C is an image of the pre-LCM motor neurons stained with cresyl violet stain (black arrows) and FIG. 1D is an image of the post-LCM depleted motor neurons (black arrows) in ventral horn.

[1040] FIG. 2 shows in-situ hybridization (ISH) using RNAscope technology to examine SOD1 expression in the motor neurons. The top panels show SOD1 mRNA (Dark grey spots above background) expression in the lumbar L2 spinal cord and in ventral horn in the inset images (see boxes). The bottom panels show ChAT staining in the motor neurons in the ventral horn. Nuclei were stained with hematoxylin in both top and bottom panels.

[1041] FIGS. 3A-3C show the digital spatial profile analysis of the Lumbar L2 spinal cord. FIG. 3A is a fluorescent image of the motor neurons labeled with ChAT, astrocytes with GFAP (highlighted areas along tissue edges) and nuclei stained with DAPI. ChAT positive motor neurons (see boxed area) were digital spatially profiled from a Lumbar L2 spinal cord sample using GeoMx Profiler (Nanostring) to study SOD1 and ChAT SEQ ID NO: 2562, mRNA expression. FIG. 3B are graphs depicting the counts and FIG. 3C (median value) are plots of the gene counts for SOD1 (top graph) and ChAT (bottom graph).

[1042] FIGS. 4A-4C are bar graphs depicting the distribution of an AAV particle with a VOY101 capsid and a viral genome (SEQ ID NO: 109, Table 15) encoding the SOD1 targeting modulatory polynucleotide, miR104-788.2 (Table 14), under the control of an H1 promoter (AAV_VOY101.SOD1) in the lower cervical spinal cord (FIG. 4A), lower thoracic spinal cord (FIG. 4B), and lower lumbar spinal cord (FIG. 4C) of SOD1^{G93A} transgenic mice. Groupings were as follows: Vehicle (Group V), 2E13 vg/kg (Group C), 6.3E12 (Group A), and 2E12 (Group B). **p<0.01; ***p<0.001; ****p<0.0001 (1-way ANOVA and Tukey's multiple comparisons).

[1043] FIGS. 5A-5C are bar graphs depicting the reduction in human SOD1 (hSOD1) mRNA after intravenous administration of an SOD1 miRNA-encoding AAV particle with a VOY101 capsid and a viral genome (SEQ ID NO: 109, Table 15) encoding the SOD1 targeting modulatory polynucleotide miR104-788.2 (SEQ ID NO: 2562, Table 14) under the control of an H1 promoter (AAV_VOY101.SOD1) in the lower cervical spinal cord (FIG. 5A), lower thoracic spinal cord (FIG. 5B), and lower lumbar spinal cord (FIG. 5C) in SOD1^{G93A} transgenic mice. Groupings were as follows: Vehicle (Group B), 2E13 vg/kg (Group C), 6.3E12 (Group D), and 2E12 (Group E). *p<0.05; **p<0.01; ***p<0.001 (1-way ANOVA and Tukey's multiple comparisons). hSOD1 mRNA levels are normalized to GAPDH+PPIA, and results are presented as values relative to the vehicle group (Group B).

[1044] FIGS. 6A-6C are graphs depicting correlations between hSOD1 mRNA levels and AAV particle distribution (VG/dg) in the lower cervical spinal cord (FIG. 6A), lower thoracic spinal cord (FIG. 6B), and lower lumbar spinal cord (FIG. 6C) of SOD1^{G93A} transgenic mice.

[1045] FIG. 7 shows the Neuroscore composite ranking of female and male wild-type mice administered vehicle and SOD1^{G93A} mice administered vehicle, 2E13 vg/kg, 6.3E12, or 2E12 vg/kg SOD1 miRNA AAV particle. The number of animals remaining in each group are also presented.

[1046] FIGS. 8A-8C are graphs depicting Kaplan-Meier survival curves for female (FIG. 8A), male (FIG. 8B), and all (FIG. 8C) wild-type mice administered vehicle and SOD1^{G93A} mice administered vehicle, 2E13 vg/kg, 6.3E12, or 2E12 vg/kg SOD1 miRNA AAV particle. **p=0.003; log-rank (Mantel-Cox) test.

[1047] FIGS. 9A and 9B are graphs depicting grip strength normalized to baseline for forelimbs (FIG. 9A) and all limbs combined (FIG. 9B) in female wild-type mice administered vehicle and SOD1^{G93A} mice administered vehicle, 2E13 vg/kg, 6.3E12, or 2E12 vg/kg SOD1 miRNA AAV particle. Baseline corresponds to the week prior to intravenous SOD1 miRNA AAV particle administration.

[1048] FIGS. 10A and 10B are graphs depicting grip strength normalized to baseline for forelimbs (FIG. 10A) and all limbs combined (FIG. 10B) in male wild-type mice administered vehicle and SOD1^{G93A} mice administered vehicle, 2E13 vg/kg, 6.3E12, or 2E12 vg/kg SOD1 miRNA AAV particle. Baseline corresponds to the week prior to intravenous SOD1 miRNA AAV particle administration.

[1049] FIG. 11 shows the distribution of an AAV particle with a wild-type AAV9 capsid or a TTD-001 capsid, in the spinal cord of NHPs in the Dorsal horn, Clarke's column, and ventral horn of NHPs by immunohistochemistry.

[1050] FIG. 12A is a graph showing the percentage of transduced cells (% HA positive cells) in various brain regions of NHPs following intravenous administration of a dose of 6.7e12 VG/kg of AAV particles comprising the TTD-001 capsid variant. FIG. 12B is a graph showing the percentage of transduced cells (% HA positive cells) in various brain regions of NHPs following intravenous administration of a dose of 2e13 VG/kg of AAV particles comprising the TTD-001 capsid variant. FIG. 12C is a graph showing the percentage of neuronal transduction (% HA cells among SMI311+ cells) in the thalamus, dentate nucleus, and spinal cord of the NHPs following intravenous administration of a dose of 2e13 VG/kg of AAV particles comprising the TTD-001 capsid variant.

[1051] FIG. 13 is a graph depicting the percentage of remaining SOD1 mRNA in cell lines after treatment with SOD1 targeting modulatory polynucleotide miR104-788.2 under the control of various promoters.

### DETAILED DESCRIPTION

### I. Overview

Disorders Associated with the Spinal Cord

[1052] The spinal cord is one of two components that together characterize the central nervous system (CNS; brain and spinal cord). The spinal cord connects the body to the brain, serving as a conduit for the messages and communications necessary for movement and sensation. The spinal cord is a fragile, thin, tubular bundle made up of nerve fibers and cell bodies, as well as support cells, housed within the vertebral column.

[1053] The motor neurons and pathways of the spinal cord are important for the initiation, execution, modification, and precision of movement. When these neurons and/or pathways are damaged in some manner, such as, but not limited to, trauma, tumorous growth, cardiovascular defects, inflammation, de-myelination, neuropathy, degeneration and/or cell death, the consequence is typically a defect in some form of movement. Similarly, sensory neurons and pathways of the spinal cord are critical for proprioception and sensation, and when damaged, can result in an inability to sense certain stimuli and/or pain syndromes.

[1054] Non-limiting examples of disorders such as those described above, which are associated with the spinal cord include, but are not limited to, motor neuron disease, amyotrophic lateral sclerosis (ALS; Lou Gehrig's disease), progressive bulbar palsy, pseudobulbar palsy, primary lateral sclerosis, progressive muscular atrophy, spinal muscular atrophy, post-polio syndrome, bulbar palsy, Kennedy's disease, hereditary spastic paraplegia, Friedreich's ataxia, Charcot-Marie-Tooth disease, hereditary motor and sensory neuropathy, peroneal muscular atrophy, neuropathies, de-myelinating diseases, viral de-myelination, metabolic de-myelination, multiple sclerosis, neuromyelitis optica (Devic's disease), concentric sclerosis (Bald's sclerosis), ataxias, paraplegia, spinocerebellar ataxia, acute-disseminated encephalomyelitis, complex regional pain syndrome (CPRS I and CPRS II), ataxia telangiectasia, episodic ataxia, multiple system atrophy, sporadic ataxia, lipid storage diseases, Niemann-Pick disease, Fabry disease, Faber's disease, GM1 or GM2 gangliosidoses, Tay-Sachs disease, Sandhoff disease, Krabbe disease, metachromatic leukodystrophy, Machado-Joseph disease (spinocerebellar ataxia type 3), meningitis, myelitis, myopathy, mitochondrial myopathy, encephalomyopathy, Barth syndrome, Chronic progressive external ophtalmoplegia, Kearns-Sayre syndrome, Leigh syndrome, mitochondrial DNA depletion syndromes, myoclonus epilepsy with ragged red fibers, NARP (neuropathy, ataxia and retinitis pigmentosa, diseases of the neuromuscular junction, myasthenia gravis, myoclonus, neuropathic pain, neurodegenerative diseases, Parkinson's disease, Alzheimer's disease, Huntington's disease, Lewy body disease, Vitamin B12 deficiency, subacute combined degeneration of the spinal cord (Lichtheim's disease), tropical spastic paraparesis, distal hereditary motor neuronopathies, Morvan's syndrome, leukodystrophies, and/or Rett syndrome.

[1055] In some embodiments, the compositions and methods of the present disclosure may be used to treat any disease of the central nervous system.

[1056] In some embodiments, the compositions and methods of the present disclosure may be used to treat a disease associated with the spinal cord.

[1057] In some embodiments, the compositions and methods of the present disclosure may be used for the treatment of a neurodegenerative disease.

[1058] In some embodiments, the compositions and methods of the present disclosure may be used for the treatment of a motor neuron disease.

[1059] In some embodiments, the compositions and methods of the present disclosure may be used for the treatment of amyotrophic lateral sclerosis (ALS).

### Amyotrophic Lateral Sclerosis (ALS) and SOD1

[1060] Amyotrophic lateral sclerosis (ALS), an adult-onset neurodegenerative disorder, is a progressive and fatal disease characterized by the selective death of motor neurons in the motor cortex, brainstem and spinal cord. Patients diagnosed with ALS develop a progressive muscle phenotype characterized by spasticity, hyperreflexia or hyporeflexia, fasciculations, muscle atrophy and paralysis. These motor impairments are caused by the de-innervation of muscles due to the loss of motor neurons. The major pathological features of ALS include degeneration of the corticospinal tracts and extensive loss of lower motor neurons (LMNs) or anterior horn cells (Ghatak et al., J Neuropathol Exp Neurol., 1986, 45, 385-395), degeneration and loss of Betz cells and other pyramidal cells in the primary motor cortex (Udaka et al., Acta Neuropathol, 1986, 70, 289-295; Maekawa et al., Brain, 2004, 127, 1237-1251) and reactive gliosis in the motor cortex and spinal cord (Kawamata et al., Am J Pathol., 1992, 140, 691-707; and Schiffer et al., J Neurol Sci., 1996, 139, 27-33). ALS is usually fatal within 3 to 5 years after the diagnosis due to respiratory defects and/or inflammation (Rowland L P and Shneibder N A, N Engl. J. Med., 2001, 344, 1688-1700).

[1061] A cellular hallmark of ALS is the presence of proteinaceous, ubiquitinated, cytoplasmic inclusions in degenerating motor neurons and surrounding cells (e.g., astrocytes). Ubiquitinated inclusions (i.e., Lewy body-like inclusions or Skein-like inclusions) are the most common and specific type of inclusion in ALS and are found in LMNs of the spinal cord and brainstem, and in corticospinal upper motor neurons (UMNs) (Matsumoto et al., J Neurol Sci., 1993, 115, 208-213; and Sasak and Maruyama, Acta Neuropathol., 1994, 87, 578-585). A few proteins have been identified to be components of the inclusions, including ubiquitin, Cu/Zn superoxide dismutase 1 (SOD1), peripherin and Dorfin. Neurofilamentous inclusions are often found in hyaline conglomerate inclusions (HCIs) and axonal ‘spheroids’ in spinal cord motor neurons in ALS. Other types and less specific inclusions include Bunina bodies (cystatin C-containing inclusions) and Crescent shaped inclusions (SCIs) in upper layers of the cortex. Other neuropathological features seen in ALS include fragmentation of the Golgi apparatus, mitochondrial vacuolization and ultrastructural abnormalities of synaptic terminals (Fujita et al., Acta Neuropathol. 2002, 103, 243-247).

[1062] In addition, in frontotemporal dementia ALS (FTD-ALS), cortical atrophy (including the frontal and temporal lobes) is also observed, which may cause cognitive impairment in FTD-ALS patients.

[1063] ALS is a complex and multifactorial disease and multiple mechanisms hypothesized as responsible for ALS pathogenesis include dysfunction of protein degradation, glutamate excitotoxicity, mitochondrial dysfunction, apoptosis, oxidative stress, inflammation, protein misfolding and aggregation, aberrant RNA metabolism, and altered gene expression.

[1064] About 10% of ALS cases have family history of the disease, and these patients are referred to as familial ALS (fALS) or inherited patients, commonly with a Mendelian dominant mode of inheritance and high penetrance. The remainder (approximately 90%-95%) is classified as sporadic ALS (sALS), as they are not associated with a documented family history, which is thought to be due to other risk factors, including environmental factors, genetic polymorphisms, somatic mutations, and possibly gene-environmental interactions. In most cases, familial (or inherited) ALS is inherited as autosomal dominant disease, but pedigrees with autosomal recessive and X-linked inheritance and incomplete penetrance exist. Sporadic and familial forms are clinically indistinguishable, suggesting a common pathogenesis. The precise cause of the selective death of motor neurons in ALS remains elusive. Progress in understanding the genetic factors in fALS may shed light on both forms of the disease.

[1065] Recently, an explosion in research and understanding of genetic causes of ALS has led to the discovery of mutations in more than 10 different genes now known to cause fALS. The most common ones are found in the genes encoding Cu/Zn superoxide dismutase 1 (SOD1; ˜20%) (Rosen D R et al., Nature, 1993, 362, 59-62), fused in sarcoma/translated in liposarcoma (FUS/TLS; 1-5%) and TDP-43 (TARDBP; 1-5%). Recently, a hexanucleotide repeat expansion (GGGGCC)ₙ in the C9orf72 gene was identified as the most frequent cause of fALS (˜40%) in the Western population (reviewed by Renton et al., Nat. Neurosci., 2014, 17, 17-23). Other genes mutated in ALS include alsin (ALS2), senataxin (SETX), vesicle-associated membrane protein (VAPB), angiogenin (ANG). fALS genes control different cellular mechanisms, suggesting that the pathogenesis of ALS is complicated and may be related to several different processes finally leading to motor neuron degeneration.

[1066] SOD1 is one of the three human superoxide dismutases identified and characterized in mammals: copper-zinc superoxide dismutase (Cu/ZnSOD or SOD1), manganese superoxide dismutase (MnSOD or SOD2), and extracellular superoxide dismutase (ECSOD or SOD3). SOD1 is a 32 kDa homodimer of a 153-residue polypeptide with one copper- and one zinc-binding site per subunit, which is encoded by SOD1 gene (GeneBank access No.: NM_000454.4) on human chromosome 21 (see Table 19). SOD1 catalyzes the reaction of superoxide anion (O²⁻) into molecular oxygen (O₂) and hydrogen peroxide (H₂O₂) at a bound copper ion. The intracellular concentration of SOD1 is high (ranging from 10 to 100 M), accounting for 1% of the total protein content in the central nervous system (CNS). The protein is localized not only in the cytoplasm but also in the nucleus, lysosomes, peroxisomes, and mitochondrial intermembrane spaces in eukaryotic cells (Lindenau J et al., Glia, 2000, 29, 25-34). Without wishing to be bound by theory, it is believed in some that in SOD1-ALS, mutation of superoxide dismutase 1 (SOD1) leads to the formation of insoluble SOD1 aggregates in motor neurons and to neurodegeneration.

[1067] Mutations in SOD1 gene are carried by 15-20% of fALS patients and by 1-2% of all ALS cases. Currently, at least 170 different mutations distributed throughout the 153-amino acid SOD1 polypeptide have been found to cause ALS, and an updated list can be found at the ALS online Genetic Database (ALSOD) (Wroe R et al., Amyotroph Lateral Scler., 2008, 9, 249-250). Table 1 lists some examples of mutations in SOD1 in ALS. These mutations are predominantly single amino acid substitutions (i.e. missense mutations) although deletions, insertions, and C-terminal truncations also occur. Different SOD1 mutations display different geographic distribution patterns. For instance, about half of all Americans with ALS caused by SOD1 gene mutations have a particular mutation Ala4Val (or A4V). The A4V mutation is typically associated with more severe signs and symptoms. The I113T mutation is by far the most common mutation in the United Kingdom. The most prevalent mutation in Europe is D90A substitution.

TABLE 1
Examples of SOD1 mutations in ALS

| | Mutations |
|---|---|
| Exon1 | Q22L; E21K, G; F20C; N19S; G16A, S; V14M, S; G12R; |
| (220 bp) | G10G, V, R; L8Q, V; V7E; C6G, F; V5L; A4T, V, S |
| Exon2 | T54R; E49K; H48R, Q; V47F, A; H46R; F45C; H43R; G41S, |
| (97 bp) | D; G37R; V29, insA |
| Exon3 | D76Y, V; G72S, C; L67R; P66A; N65S; S59I, S |
| (70 bp) | |
| Exon4 | D124G, V; V118L, InsAAAAC; L117V; T116T; R115G; |
| (118 bp) | G114A; I113T, F; I112M, T; G108V; L106V, F; S106L, |
| | delTCACTC; I104F; D101G, Y, H, N; E100G, K; I99V; |
| | V97L, M; D96N, V; A95T, V; G93S, V, A, C, R, D; D90V, |
| | A; A89T, V; T88delACTGCTGAC; V87A, M; N86I, S, D, |
| | K; G85R, S; L84V, F; H80R |
| Exon5 | I151T, S; I149T; V148I, G; G147D, R; C146R, stop; A145T, |
| (461 bp) | G; L144F, S; G141E, stop; A140A, G; N139D, K, H, N; |
| | G138E; T137R; S134N; E133V, delGAA, insTT; E132insTT; |
| | G127R, InsTGGG; L126S, delITT, stop; D126, delTT |

[1068] To investigate the mechanism of neuronal death associated with SOD1 gene defects, several rodent models of SOD1-linked ALS were developed in the art, which express the human SOD1 gene with different mutations, including missense mutations, small deletions or insertions. Some examples of ALS mouse models include SOD1^{G93A}, SOD1^{A4V}, SOD1^{G37R}, SOD1^{G85R}, SOD1^{D90A}, SOD1^{L84V}, SOD1^{I113T}, SOD1^{H36R/H48Q}, SOD1^{G127X}, SOD1^{L126X} and SOD1^{L126delTT}. There are two transgene rat models carrying two different human SOD1 mutations: SOD1^{H46R} and SOD1^{G93R}. These rodent ALS models can develop muscle weakness similar to human ALS patients and other pathogenic features that reflect several characteristics of the human disease, in particular, the selective death of spinal motor neurons, aggregation of protein inclusions in motor neurons and microglial activation. It is well known in the art that the transgenic rodents are good models of human SOD1-associated ALS disease and provide models for studying disease pathogenesis and developing disease treatment.

[1069] Studies in animal and cellular models showed that SOD1 pathogenic variants cause ALS by gain of function. That is to say, the superoxide dismutase enzyme gains new but harmful properties when altered by SOD1 mutations. For example, some SOD1 mutated variants in ALS increase oxidative stress (e.g., increased accumulation of toxic superoxide radicals) by disrupting redox cycle. Other studies also indicate that some SOD1 mutated variants in ALS might acquire toxic properties that are independent of its normal physiological function (such as abnormal aggregation of misfolded SOD1 variants). In the aberrant redox chemistry model, mutant SOD1 is unstable and through aberrant chemistry interacts with nonconventional substrates causing reactive oxygen species (ROS) overproduction. In the protein toxicity model, unstable, misfolded SOD1 aggregates into cytoplasmic inclusion bodies, sequestering proteins crucial for cellular processes. These two hypotheses are not mutually exclusive. It has been shown that oxidation of selected histidine residues that bind metals in the active site mediates SOD1 aggregation.

[1070] The aggregated mutant SOD1 protein may also induce mitochondrial dysfunction (Vehvilainen P et al., Front Cell Neurosci., 2014, 8, 126), impairment of axonal transport, aberrant RNA metabolism, glial cell pathology and glutamate excitotoxicity. In some sporadic ALS cases, misfolded wild-type SOD1 protein is found in diseased motor neurons which forms “toxic conformation” that is similar to familial ALS-linked SOD1 variants (Rotunno M S and Bosco D A, Front Cell Neurosci., 2013, 16, 7, 253). Such evidence suggests that ALS is a protein misfolding disease analogous to other neurodegenerative diseases such as Alzheimer's disease and Parkinson's disease.

[1071] Currently, no curative treatments are available for patients suffering from ALS. Until recently, the only FDA approved drug was Riluzole (also called Rilutek), an inhibitor of glutamate release, with a moderate effect on ALS, only extending survival by 2-3 months if it is taken for 18 months. Unfortunately, patients taking riluzole do not experience any slowing in disease progression or improvement in muscle function. Therefore, riluzole does not present a cure, or even an effective treatment. In 2017, the FDA approved Radicava (edaravone) for the treatment of ALS, the first such approval in 22 years. Administered intravenously and serving as a free-radical scavenger and anti-oxidant, Radicava has been shown to slow disease progression. In a clinical Phase 3 trial (NCT01492686) of 137 patients, Radicava slowed the decline in physical function as compared to those patients taking placebo and as determined by score on the ALS Functional Rating Scale-Revised (ALSFRS-R) (Writing group; Edaravone (MCI-186) ALS 19 Study Group Lancet Neurol. 2017 July; 16(7):505-512). The approval of Radicava is considered an advance in terms of treatment of ALS, however it is still not a cure. Researchers continue to search for better therapeutic agents.

[1072] One approach to inhibit abnormal SOD1 protein aggregation is to silence/inhibit SOD1 gene expression in ALS. It has been reported that small interfering RNAs for specific gene silencing of the mutated allele is therapeutically beneficial for the treatment of fALS (e.g., Ralgh G S et al., Nat. Medicine, 2005, 11(4), 429-433; and Raoul C et al., Nat. Medicine, 2005, 11(4), 423-428; and Maxwell M M et al., PNAS, 2004, 101(9), 3178-3183; and Ding H et al., Chinese Medical J., 2011, 124(1), 106-110; and Scharz D S et al., Plos Genet., 2006, 2(9), e140; the content of each of which is incorporated herein by reference in their entirety).

[1073] Many other RNA therapeutic agents that target SOD1 gene and modulate SOD1 expression in ALS are taught in the art, such RNA based agents include antisense oligonucleotides and double stranded small interfering RNAs. See, e.g., Wang H et al., J Biol. Chem., 2008, 283(23), 15845-15852); U.S. Pat. Nos. 7,498,316; 7,632,938; 7,678,895; 7,951,784; 7,977,314; 8,183,219; 8,309,533 and 8, 586, 554; and U.S. Patent publication Nos. 2006/0229268 and 2011/0263680; the content of each of which is herein incorporated by reference in their entirety.

[1074] The present disclosure employs viral vectors such as adeno-associated viral (AAV) vectors to deliver siRNA duplexes or SOD1 targeting polynucleotides into cells with high efficiency. The AAV vectors comprising RNAi molecules, e.g., siRNA molecules of the present disclosure may increase the delivery of active agents into motor neurons. SOD1 targeting polynucleotides may be able to inhibit SOD1 gene expression (e.g., mRNA level) significantly inside cells; therefore, ameliorating SOD1 expression induced stress inside the cells such as aggregation of protein and formation of inclusions, increased free radicals, mitochondrial dysfunction and RNA metabolism.

[1075] Such SOD1 targeting polynucleotides may be used for treating ALS. According to the present disclosure, methods for treating and/or ameliorating ALS in a patient comprises administering to the patient an effective amount of at least one SOD1 targeting polynucleotide encoding one or more siRNA duplexes into cells and allowing the inhibition/silence of SOD1 gene expression, are provided.

### Adeno-Associated Viral (AAV) Vectors

[1076] Described herein, inter alia, are compositions comprising isolated, e.g., recombinant, viral particles, e.g., AAV particles, for delivery, e.g., vectorized delivery, of a polynucleotide, e.g., a SOD1 targeting siRNA, and methods of making and using the same. Adeno-associated viruses (AAV) are small non-enveloped icosahedral capsid viruses of the Parvoviridae family characterized by a single stranded DNA viral genome. Parvoviridae family viruses consist of two subfamilies: Parvovirinae, which infect vertebrates, and Densovirinae, which infect invertebrates. The Parvoviridae family includes the Dependovirus genus which includes AAV, capable of replication in vertebrate hosts including, but not limited to, human, primate, bovine, canine, equine, and ovine species.

[1077] The parvoviruses and other members of the Parvoviridae family are generally described in Kenneth I. Berns, “Parvoviridae: The Viruses and Their Replication,” Chapter 69 in Fields Virology (3d Ed. 1996), the contents of which are incorporated by reference in their entirety.

[1078] AAV have proven to be useful as a biological tool due to their relatively simple structure, their ability to infect a wide range of cells (including quiescent and dividing cells) without integration into the host genome and without replicating, and their relatively benign immunogenic profile. The genome of the virus may be manipulated to contain a minimum of components for the assembly of a functional recombinant virus, or viral particle, which is loaded with or engineered to target a particular tissue and express or deliver a desired payload. The genome of the virus may be modified to contain a minimum of components for the assembly of a functional recombinant virus, or viral particle, which is loaded with or engineered to express or deliver a desired nucleic acid construct or payload, e.g., a transgene, a polynucleotide encoding a siRNA, e.g., a SOD1 targeting siRNA duplex which may be delivered to a target cell, tissue, or organism. In some embodiments, the target cell is a CNS cell. In some embodiments, the target tissue is a CNS tissue. The target CNS tissue may be brain tissue. In some embodiments, region of the CNS is a region of the brain or spinal cord, e.g., the parenchyma, the cortex, substantia nigra, caudate cerebellum, striatum, corpus callosum, cerebellum, brain stem caudate-putamen, thalamus, superior colliculus, the spinal cord, or a combination thereof.

[1079] Gene therapy presents an alternative approach for ALS, and diseases sharing single-gene etiology, such as Gaucher disease and Dementia with Lewy Bodies and related disorders. AAVs are commonly used in gene therapy approaches as a result of a number of advantageous features. Without wishing to be bound by theory, it is believed in some embodiments, that expression vectors, e.g., an adeno-associated viral vector (AAVs) or AAV particle, e.g., an AAV particle described herein, can be used to administer and/or deliver a siRNA (e.g., a SOD1 targeting siRNA), in order to achieve sustained, high concentrations, allowing for longer lasting efficacy, fewer dose treatments, broad biodistribution, and/or more consistent levels of the siRNA, relative to a non-AAV therapy.

[1080] As demonstrated in some of the Examples herein below, certain AAV capsid variants described herein show multiple advantages over wild-type AAV9, including (i) increased penetrance through the blood brain barrier following intravenous administration, (ii) wider distribution throughout the multiple brain regions, e.g., frontal cortex, sensory cortex, motor cortex, putamen, thalamus, cerebellar cortex, dentate nucleus, caudate, and/or hippocampus, and/or (iii) elevated payload expression in multiple brain regions. Without wishing to be being bound by theory, it is believed that these advantages may be due, in part, to the dissemination of the AAV capsid variants through the brain vasculature. In some embodiments, the AAV capsids described herein enhance the delivery of a payload, e.g., a transgene, a polynucleotide encoding a siRNA, e.g., a SOD1 targeting siRNA as described herein, to multiple regions of the brain including for example, the frontal cortex, sensory cortex, motor cortex, putamen, thalamus, cerebellar cortex, dentate nucleus, caudate, and/or hippocampus. In some embodiments, enhance the expression of a payload, e.g., a SOD1 targeting siRNA described herein, to multiple cell types in the CNS, e.g., neurons, oligodendrocytes, and/or glial cells. Without wishing to be bound by theory, an AAV particle comprising an AAV capsid polypeptide, e.g., an AAV capsid variant described herein, for the vectorized delivery of a SOD1 targeting siRNA described here can result in increased penetrance through the blood brain barrier, e.g., following intravenous administration, and/or increased biodistribution of the SOD1 targeting siRNA in the central nervous system, e.g., the brain and the spinal cord.

### II. Compositions

### Vectors

[1081] In some embodiments, the siRNA molecules described herein can be inserted into, or encoded by, vectors such as plasmids or viral vectors. Preferably, the siRNA molecules are inserted into, or encoded by, viral vectors.

[1082] Viral vectors may be Herpesvirus (HSV) vectors, retroviral vectors, adenoviral vectors, adeno-associated viral vectors, lentiviral vectors, and the like. In some specific embodiments, the viral vectors are AAV vectors.

### Adeno-Associated Viral (AAV) Vectors

[1083] AAV have a genome of about 5,000 nucleotides in length which contains two open reading frames encoding the proteins responsible for replication (Rep) and the structural protein of the capsid (Cap). The open reading frames are flanked by two Inverted Terminal Repeat (ITR) sequences, which serve as the origin of replication of the viral genome. The wild-type AAV viral genome comprises nucleotide sequences for two open reading frames, one for the four non-structural Rep proteins (Rep78, Rep68, Rep52, Rep40, encoded by Rep genes) and one for the three capsid, or structural, proteins (VP1, VP2, VP3, encoded by capsid genes or Cap genes). The Rep proteins are important for replication and packaging, while the capsid proteins are assembled to create the protein shell of the AAV, or AAV capsid. Alternative splicing and alternate initiation codons and promoters result in the generation of four different Rep proteins from a single open reading frame and the generation of three capsid proteins from a single open reading frame. Though it varies by AAV serotype, as a non-limiting example, for AAV9/hu.14 (SEQ ID NO: 123 of U.S. Pat. No. 7,906,111, the contents of which are herein incorporated by reference in their entirety; SEQ ID NO: 138, Table 2, herein) VP1 refers to amino acids 1-736, VP2 refers to amino acids 138-736, and VP3 refers to amino acids 203-736. As another non-limiting example, VP1 refers to amino acids 1-743 numbered according to SEQ ID NO: 1, VP2 refers to amino acids 138-743 numbered according to SEQ ID NO: 1, and VP3 refers to amino acids 203-743 numbered according to SEQ ID NO: 1. In other words, VP1 is the full-length capsid sequence, while VP2 and VP3 are shorter components of the whole. As a result, changes in the sequence in the VP3 region, are also changes to VP1 and VP2, however, the percent difference as compared to the parent sequence will be greatest for VP3 since it is the shortest sequence of the three. Though described here in relation to the amino acid sequence, the nucleic acid sequence encoding these proteins can be similarly described. Together, the three capsid proteins assemble to create the AAV capsid protein. While not wishing to be bound by theory, the AAV capsid protein typically comprises a molar ratio of 1:1:10 of VP1:VP2:VP3. As used herein, an “AAV serotype” is defined primarily by the AAV capsid. In some instances, the ITRs are also specifically described by the AAV serotype (e.g., AAV2/9).

[1084] The AAV vector typically requires a co-helper (e.g., adenovirus) to undergo productive infection in cells. In the absence of such helper functions, the AAV virions essentially enter host cells but do not integrate into the cells' genome.

[1085] AAV vectors have been investigated for delivery of gene therapeutics because of several unique features. Non-limiting examples of the features include (i) the ability to infect both dividing and non-dividing cells; (ii) a broad host range for infectivity, including human cells; (iii) wild-type AAV has not been associated with any disease and has not been shown to replicate in infected cells; (iv) the lack of cell-mediated immune response against the vector, and (v) the non-integrative nature in a host chromosome thereby reducing potential for long-term genetic alterations. Moreover, infection with AAV vectors has minimal influence on changing the pattern of cellular gene expression (Stilwell and Samulski et al., Biotechniques, 2003, 34, 148, the contents of which are herein incorporated by reference in their entirety).

[1086] Typically, AAV particle for delivery of an siRNA, e.g., an siRNA for targeting SOD1 as described herein, may be recombinant viral vectors which are replication defective as they lack sequences encoding functional Rep and Cap proteins within the viral genome. In some cases, the defective AAV genome may lack most or all coding sequences and essentially only contain one or two AAV ITR sequences and a payload sequence. In certain embodiments, the viral genome encodes a siRNA for targeting SOD1.

[1087] In some embodiments, the AAV particles of the present disclosure may be introduced into mammalian cells.

[1088] AAV particles may be modified to enhance the efficiency of delivery. Such modified AAV particles of the present disclosure can be packaged efficiently and can be used to successfully infect the target cells at high frequency and with minimal toxicity.

[1089] In other embodiments, AAV particles of the present disclosure may be used to deliver a siRNA (e.g., a siRNA targeting SOD1 as described herein) to the central nervous system (see, e.g., U.S. Pat. No. 6,180,613; the contents of which are herein incorporated by reference in their entirety) or to specific tissues of the CNS.

[1090] It is understood that the compositions described herein may have additional conservative or non-essential amino acid substitutions, which do not have a substantial effect on their functions.

### AAV Capsids and Variants Thereof

[1091] In some embodiments, an AAV particle, e.g., an AAV particle for the vectorized delivery of SOD1 targeting polynucleotide herein (e.g., a RNAi), may comprise an AAV capsid polypeptide, e.g., an AAV capsid variant.

[1092] In some embodiments, the AAV capsid polypeptide, e.g., AAV capsid variant, allows for blood brain barrier penetration following intravenous administration. In some embodiments, the AAV capsid, e.g., AAV capsid variant, allows for blood brain barrier penetration following focused ultrasound (FUS), e.g., coupled with the intravenous administration of microbubbles (FUS-MB), or MRI-guided FUS coupled with intravenous administration. In some embodiments the AAV capsid, e.g., AAV capsid variant allows for increased distribution to a brain region. In some embodiments, the brain region comprises a frontal cortex, sensory cortex, motor cortex, caudate, dentate nucleus, cerebellar cortex, cerebral cortex, brain stem, hippocampus, thalamus, putamen, or a combination thereof. In some embodiments, the AAV capsid, e.g., AAV capsid variant allows for preferential transduction in a brain region relative to the transduction in the dorsal root ganglia (DRG).

[1093] In some embodiments the AAV capsid polypeptide, e.g., AAV capsid variant allows for increased distribution to a spinal cord region. In some embodiments, the spinal region comprises a cervical spinal cord region, thoracic spinal cord region, and/or lumbar spinal cord region.

[1094] In some embodiments, the AAV capsid polypeptide, e.g., an AAV capsid variant comprises a VOY101 capsid polypeptide, an AAVPHP.B (PHP.B) capsid polypeptide, a AAVPHP.N (PHP.N) capsid polypeptide, an AAV1 capsid polypeptide, an AAV2 capsid polypeptide, an AAV5 capsid polypeptide, an AAV9 capsid polypeptide, an AAV9 K449R capsid polypeptide, an AAVrh10 capsid polypeptide, or a functional variant thereof. In some embodiments, the AAV capsid polypeptide, e.g., AAV capsid variant, comprises an amino acid sequence of any of the AAV capsid polypeptides in Table 2, or an amino acid sequence substantially identical (e.g., having at least 70%, 75%, 80%, 85%, 90%, 92%, 95%, 97%, 98%, or 99% sequence identity) thereto. In some embodiments, the nucleotide sequence encoding the AAV capsid polypeptide comprises any one of the nucleotide sequences in Table 2, or a nucleotide sequence substantially identical (e.g., having at least 70%, 75%, 80%, 85%, 90%, 92%, 95%, 97%, 98%, or 99% sequence identity) thereto.

[1095] In some embodiments, the AAV capsid variant, described herein does not comprise an amino acid sequence present immediately subsequent to position 586, 588, or 589 numbered relative to SEQ ID NO: 138, having at least 5 consecutive amino acids corresponding to positions 586 to 599, e.g., 586 to 594, 587 to 595, 588 to 596, 589 to 597, 590 to 598, numbered relative to the amino acid sequences in Table 1 of WO2020223276, the contents of which are hereby incorporated by reference in their entirety.

[1096] In any of the embodiments described herein, a position comprising 5 consecutive amino acids corresponding to positions 586 to 599, e.g., 586 to 594, 587 to 595, 588 to 596, 589 to 597, 590 to 598 numbered relative to SEQ ID NO: 138 can be identified by providing an alignment of a reference sequence and a query sequence, wherein the reference sequence is SEQ ID NO: 138, and identifying the residues corresponding to the positions in the query sequence that correspond to positions 586 to 599, e.g., 586 to 594, 587 to 595, 588 to 596, 589 to 597, 590 to 598 in the reference sequence.

[1097] In some embodiments, the AAV capsid polypeptide, e.g., AAV capsid variant, described herein does not comprise an amino acid sequence present immediately subsequent to position 586, 588, or 589 numbered relative to SEQ ID NO: 138, at least 5 consecutive amino acids corresponding to positions 586 to 599, e.g., 586 to 594, 587 to 595, 588 to 596, 589 to 597, 590 to 598, numbered relative to SEQ ID NO: 138. In some embodiments, the AAV capsid polypeptide, e.g., AAV capsid variant, described herein, does not comprise an amino acid sequence present immediately subsequent to position 586, 588, or 589 numbered relative to SEQ ID NO: 138, having at least 5 consecutive amino acids corresponding to positions 586 to 599, e.g., 586 to 594, 587 to 595, 588 to 596, 589 to 597, 590 to 598, numbered relative to SEQ ID NO: 12. In some embodiments, the AAV capsid polypeptide, e.g., AAV capsid variant, described herein, does not comprise an amino acid sequence present immediately subsequent to position 586, 588, or 589 numbered relative to SEQ ID NO: 138, having at least than 5 consecutive amino acids corresponding to positions 586 to 599, e.g., 586 to 594, 587 to 595, 588 to 596, 589 to 597, 590 to 598, numbered relative to SEQ ID NO: 13. In some embodiments, the AAV capsid polypeptide, e.g., AAV capsid variant, or the parent AAV capsid may be, at a position other than 5 consecutive amino acids corresponding to positions 586 to 599, e.g., 586 to 594, 587 to 595, 588 to 596, 589 to 597, 590 to 598, numbered relative to SEQ ID NO: 1.

TABLE 2
Exemplary full length capsid sequences

| | SEQ | |
|---|---|---|
| | ID | |
| Description | NO: | Sequence Information |
| VOY101 | 1 | MAADGYLPDWLEDNLSEGIREWWALKPGAPQPKANQQHQDNARGLVLPGYKYLGPGNGL |
| | | DKGEPVNAADAAALEHDKAYDQQLKAGDNPYLKYNHADAEFQERLKEDTSFGGNLGRAV |
| | | FQAKKRLLEPLGLVEEAAKTAPGKKRPVEQSPQEPDSSAGIGKSGAQPAKKRLNFGQTG |
| | | DTESVPDPQPIGEPPAAPSGVGSLTMASGGGAPVADNNEGADGVGSSSGNWHCDSQWLG |
| | | DRVITTSTRTWALPTYNNHLYKQISNSTSGGSSNDNAYFGYSTPWGYFDFNRFHCHFSP |
| | | RDWQRLINNNWGFRPKRLNFKLFNIQVKEVTDNNGVKTIANNLTSTVQVFTDSDYQLPY |
| | | VLGSAHEGCLPPFPADVFMIPQYGYLTLNDGSQAVGRSSFYCLEYFPSQMLRTGNNFQF |
| | | SYEFENVPFHSSYAHSQSLDRLMNPLIDQYLYYLSKTINGSGQNQQTLKFSVAGPSNMA |
| | | VQGRNYIPGPSYRQQRVSTTVTQNNNSEFAWPGASSWALNGRNSLMNPGPAMASHKEGE |
| | | DRFFPLSGSLIFGKQGTGRDNVDADKVMITNEEEIKTTNPVATESYGQVATNHQSDGTL |
| | | AVPFKAQAQTGWVQNQGILPGMVWQDRDVYLQGPIWAKIPHTDGNFHPSPLMGGFGMKH |
| | | PPPQILIKNTPVPADPPTAFNKDKLNSFITQYSTGQVSVEIEWELQKENSKRWNPEIQY |
| | | TSNYYKSNNVEFAVNTEGVYSEPRPIGTRYLTRNL |
| AAV9/hu.14 | 11 | MAADGYLPDWLEDNLSEGIREWWALKPGAPQPKANQQHQDNARGLVLPGYKYLGPGNGL |
| K449R | | DKGEPVNAADAAALEHDKAYDQQLKAGDNPYLKYNHADAEFQERLKEDTSFGGNLGRAV |
| | | FQAKKRLLEPLGLVEEAAKTAPGKKRPVEQSPQEPDSSAGIGKSGAQPAKKRLNFGQTG |
| | | DTESVPDPQPIGEPPAAPSGVGSLTMASGGGAPVADNNEGADGVGSSSGNWHCDSQWLG |
| | | DRVITTSTRTWALPTYNNHLYKQISNSTSGGSSNDNAYFGYSTPWGYFDFNRFHCHFSP |
| | | RDWQRLINNNWGFRPKRLNFKLFNIQVKEVTDNNGVKTIANNLTSTVQVFTDSDYQLPY |
| | | VLGSAHEGCLPPFPADVFMIPQYGYLTLNDGSQAVGRSSFYCLEYFPSQMLRTGNNFQF |
| | | SYEFENVPFHSSYAHSQSLDRLMNPLIDQYLYYLSRTINGSGQNQQTLKFSVAGPSNMA |
| | | VQGRNYIPGPSYRQQRVSTTVTQNNNSEFAWPGASSWALNGRNSLMNPGPAMASHKEGE |
| | | DRFFPLSGSLIFGKQGTGRDNVDADKVMITNEEEIKTTNPVATESYGQVATNHQSAQAQ |
| | | AQTGWVQNQGILPGMVWQDRDVYLQGPIWAKIPHTDGNFHPSPLMGGFGMKHPPPQILI |
| | | KNTPVPADPPTAFNKDKLNSFITQYSTGQVSVEIEWELQKENSKRWNPEIQYTSNYYKS |
| | | NNVEFAVNTEGVYSEPRPIGTRYLTRNL |
| AAV9/hu.14 | 138 | MAADGYLPDWLEDNLSEGIREWWALKPGAPQPKANQQHQDNARGLVLPGYKYLGPGNGL |
| WT | | DKGEPVNAADAAALEHDKAYDQQLKAGDNPYLKYNHADAEFQERLKEDTSEGGNLGRAV |
| (amino acid) | | FQAKKRLLEPLGLVEEAAKTAPGKKRPVEQSPQEPDSSAGIGKSGAQPAKKRLNFGQTG |
| | | DTESVPDPQPIGEPPAAPSGVGSLTMASGGGAPVADNNEGADGVGSSSGNWHCDSQWLG |
| | | DRVITTSTRTWALPTYNNHLYKQISNSTSGGSSNDNAYFGYSTPWGYFDFNRFHCHFSP |
| | | RDWQRLINNNWGFRPKRLNFKLFNIQVKEVTDNNGVKTIANNLTSTVQVFTDSDYQLPY |
| | | VLGSAHEGCLPPFPADVEMIPQYGYLTLNDGSQAVGRSSFYCLEYFPSQMLRTGNNFQF |
| | | SYEFENVPFHSSYAHSQSLDRLMNPLIDQYLYYLSKTINGSGQNQQTLKFSVAGPSNMA |
| | | VQGRNYIPGPSYRQQRVSTTVTQNNNSEFAWPGASSWALNGRNSLMNPGPAMASHKEGE |
| | | DRFFPLSGSLIFGKQGTGRDNVDADKVMITNEEEIKTTNPVATESYGQVATNHQSAQAQ |
| | | AQTGWVQNQGILPGMVWQDRDVYLQGPIWAKIPHTDGNFHPSPLMGGFGMKHPPPQILI |
| | | KNTPVPADPPTAFNKDKLNSFITQYSTGQVSVEIEWELQKENSKRWNPEIQYTSNYYKS |
| | | NNVEFAVNTEGVYSEPRPIGTRYLTRNL |
| AAV9/hu.14 | 137 | ATGGCTGCCGATGGTTATCTTCCAGATTGGCTCGAGGACAACCTTAGTGAAGGAATTCG |
| WT | | CGAGTGGTGGGCTTTGAAACCTGGAGCCCCTCAACCCAAGGCAAATCAACAACATCAAG |
| (DNA) | | ACAACGCTCGAGGTCTTGTGCTTCCGGGTTACAAATACCTTGGACCCGGCAACGGACTC |
| | | GACAAGGGGGAGCCGGTCAACGCAGCAGACGCGGCGGCCCTCGAGCACGACAAGGCCTA |
| | | CGACCAGCAGCTCAAGGCCGGAGACAACCCGTACCTCAAGTACAACCACGCCGACGCCG |
| | | AGTTCCAGGAGCGGCTCAAAGAAGATACGTCTTTTGGGGGCAACCTCGGGCGAGCAGTC |
| | | TTCCAGGCCAAAAAGAGGCTTCTTGAACCTCTTGGTCTGGTTGAGGAAGCGGCTAAGAC |
| | | GGCTCCTGGAAAGAAGAGGCCTGTAGAGCAGTCTCCTCAGGAACCGGACTCCTCCGCGG |
| | | GTATTGGCAAATCGGGTGCACAGCCCGCTAAAAAGAGACTCAATTTCGGTCAGACTGGC |
| | | GACACAGAGTCAGTCCCAGACCCTCAACCAATCGGAGAACCTCCCGCAGCCCCCTCAGG |
| | | TGTGGGATCTCTTACAATGGCTTCAGGTGGTGGCGCACCAGTGGCAGACAATAACGAAG |
| | | GTGCCGATGGAGTGGGTAGTTCCTCGGGAAATTGGCATTGCGATTCCCAATGGCTGGGG |
| | | GACAGAGTCATCACCACCAGCACCCGAACCTGGGCCCTGCCCACCTACAACAATCACCT |
| | | CTACAAGCAAATCTCCAACAGCACATCTGGAGGATCTTCAAATGACAACGCCTACTTCG |
| | | GCTACAGCACCCCCTGGGGGTATTTTGACTTCAACAGATTCCACTGCCACTTCTCACCA |
| | | CGTGACTGGCAGCGACTCATCAACAACAACTGGGGATTCCGGCCTAAGCGACTCAACTT |
| | | CAAGCTCTTCAACATTCAGGTCAAAGAGGTTACGGACAACAATGGAGTCAAGACCATCG |
| | | CCAATAACCTTACCAGCACGGTCCAGGTCTTCACGGACTCAGACTATCAGCTCCCGTAC |
| | | GTGCTCGGGTCGGCTCACGAGGGCTGCCTCCCGCCGTTCCCAGCGGACGTTTTCATGAT |
| | | TCCTCAGTACGGGTATCTGACGCTTAATGATGGAAGCCAGGCCGTGGGTCGTTCGTCCT |
| | | TTTACTGCCTGGAATATTTCCCGTCGCAAATGCTAAGAACGGGTAACAACTTCCAGTTC |
| | | AGCTACGAGTTTGAGAACGTACCTTTCCATAGCAGCTACGCTCACAGCCAAAGCCTGGA |
| | | CCGACTAATGAATCCACTCATCGACCAATACTTGTACTATCTCTCAAAGACTATTAACG |
| | | GTTCTGGACAGAATCAACAAACGCTAAAATTCAGTGTGGCCGGACCCAGCAACATGGCT |
| | | GTCCAGGGAAGAAACTACATACCTGGACCCAGCTACCGACAACAACGTGTCTCAACCAC |
| | | TGTGACTCAAAACAACAACAGCGAATTTGCTTGGCCTGGAGCTTCTTCTTGGGCTCTCA |
| | | ATGGACGTAATAGCTTGATGAATCCTGGACCTGCTATGGCCAGCCACAAAGAAGGAGAG |
| | | GACCGTTTCTTTCCTTTGTCTGGATCTTTAATTTTTGGCAAACAAGGAACTGGAAGAGA |
| | | CAACGTGGATGCGGACAAAGTCATGATAACCAACGAAGAAGAAATTAAAACTACTAACC |
| | | CGGTAGCAACGGAGTCCTATGGACAAGTGGCCACAAACCACCAGAGTGCCCAAGCACAG |
| | | GCGCAGACCGGCTGGGTTCAAAACCAAGGAATACTTCCGGGTATGGTTTGGCAGGACAG |
| | | AGATGTGTACCTGCAAGGACCCATTTGGGCCAAAATTCCTCACACGGACGGCAACTTTC |
| | | ACCCTTCTCCGCTGATGGGAGGGTTTGGAATGAAGCACCCGCCTCCTCAGATCCTCATC |
| | | AAAAACACACCTGTACCTGCGGATCCTCCAACGGCCTTCAACAAGGACAAGCTGAACTC |
| | | TTTCATCACCCAGTATTCTACTGGCCAAGTCAGCGTGGAGATCGAGTGGGAGCTGCAGA |
| | | AGGAAAACAGCAAGCGCTGGAACCCGGAGATCCAGTACACTTCCAACTATTACAAGTCT |
| | | AATAATGTTGAATTTGCTGTTAATACTGAAGGTGTATATAGTGAACCCCGCCCCATTGG |
| | | CACCAGATACCTGACTCGTAATCTGTAA |
| PHP.B | 12 | MAADGYLPDWLEDNLSEGIREWWALKPGAPQPKANQQHQDNARGLVLPGYKYLGPGNGL |
| (amino acid) | | DKGEPVNAADAAALEHDKAYDQQLKAGDNPYLKYNHADAEFQERLKEDTSFGGNLGRAV |
| | | FQAKKRLLEPLGLVEEAAKTAPGKKRPVEQSPQEPDSSAGIGKSGAQPAKKRLNFGQTG |
| | | DTESVPDPQPIGEPPAAPSGVGSLTMASGGGAPVADNNEGADGVGSSSGNWHCDSQWLG |
| | | DRVITTSTRTWALPTYNNHLYKQISNSTSGGSSNDNAYFGYSTPWGYFDFNRFHCHFSP |
| | | RDWQRLINNNWGFRPKRLNFKLFNIQVKEVTDNNGVKTIANNLTSTVQVFTDSDYQLPY |
| | | VLGSAHEGCLPPFPADVFMIPQYGYLTLNDGSQAVGRSSFYCLEYFPSQMLRTGNNFQF |
| | | SYEFENVPFHSSYAHSQSLDRLMNPLIDQYLYYLSRTINGSGQNQQTLKFSVAGPSNMA |
| | | VQGRNYIPGPSYRQQRVSTTVTQNNNSEFAWPGASSWALNGRNSLMNPGPAMASHKEGE |
| | | DRFFPLSGSLIFGKQGTGRDNVDADKVMITNEEEIKTTNPVATESYGQVATNHQSAQTL |
| | | AVPFKAQAQTGWVQNQGILPGMVWQDRDVYLQGPIWAKIPHTDGNFHPSPLMGGFGMKH |
| | | PPPQILIKNTPVPADPPTAFNKDKLNSFITQYSTGQVSVEIEWELQKENSKRWNPEIQY |
| | | TSNYYKSNNVEFAVNTEGVYSEPRPIGTRYLTRNL |
| PHP.N | 13 | MAADGYLPDWLEDNLSEGIREWWALKPGAPQPKANQQHQDNARGLVLPGYKYLGPGNGL |
| (amino acid) | | DKGEPVNAADAAALEHDKAYDQQLKAGDNPYLKYNHADAEFQERLKEDTSFGGNLGRAV |
| | | FQAKKRLLEPLGLVEEAAKTAPGKKRPVEQSPQEPDSSAGIGKSGAQPAKKRLNFGQTG |
| | | DTESVPDPQPIGEPPAAPSGVGSLTMASGGGAPVADNNEGADGVGSSSGNWHCDSQWLG |
| | | DRVITTSTRTWALPTYNNHLYKQISNSTSGGSSNDNAYFGYSTPWGYFDFNRFHCHFSP |
| | | RDWQRLINNNWGFRPKRLNFKLFNIQVKEVTDNNGVKTIANNLTSTVQVFTDSDYQLPY |
| | | VLGSAHEGCLPPFPADVFMIPQYGYLTLNDGSQAVGRSSFYCLEYFPSQMLRTGNNFQF |
| | | SYEFENVPFHSSYAHSQSLDRLMNPLIDQYLYYLSRTINGSGQNQQTLKFSVAGPSNMA |
| | | VQGRNYIPGPSYRQQRVSTTVTQNNNSEFAWPGASSWALNGRNSLMNPGPAMASHKEGE |
| | | DRFFPLSGSLIFGKQGTGRDNVDADKVMITNEEEIKTTNPVATESYGQVATNHQSDGTL |
| | | AVPFKAQAQTGWVQNQGILPGMVWQDRDVYLQGPIWAKIPHTDGNFHPSPLMGGFGMKH |
| | | PPPQILIKNTPVPADPPTAFNKDKLNSFITQYSTGQVSVEIEWELQKENSKRWNPEIQY |
| | | TSNYYKSNNVEFAVNTEGVYSEPRPIGTRYLTRNL |
| AAVrh10 | 14 | MAADGYLPDWLEDNLSEGIREWWDLKPGAPKPKANQQKQDDGRGLVLPGYKYLGPFNGL |
| (amino acid) | | DKGEPVNAADAAALEHDKAYDQQLKAGDNPYLRYNHADAEFQERLQEDTSFGGNLGRAV |
| | | FQAKKRVLEPLGLVEEGAKTAPGKKRPVEPSPQRSPDSSTGIGKKGQQPAKKRLNFGQT |
| | | GDSESVPDPQPIGEPPAGPSGLGSGTMAAGGGAPMADNNEGADGVGSSSGNWHCDSTWL |
| | | GDRVITTSTRTWALPTYNNHLYKQISNGTSGGSTNDNTYFGYSTPWGYFDFNRFHCHFS |
| | | PRDWQRLINNNWGFRPKRLNFKLFNIQVKEVTQNEGTKTIANNLTSTIQVFTDSEYQLP |
| | | YVLGSAHQGCLPPFPADVFMIPQYGYLTLNNGSQAVGRSSFYCLEYFPSQMLRTGNNFE |
| | | FSYQFEDVPFHSSYAHSQSLDRLMNPLIDQYLYYLSRTQSTGGTAGTQQLLFSQAGPNN |
| | | MSAQAKNWLPGPCYRQQRVSTTLSQNNNSNFAWTGATKYHLNGRDSLVNPGVAMATHKD |
| | | DEERFFPSSGVLMFGKQGAGKDNVDYSSVMLTSEEEIKTTNPVATEQYGVVADNLQQQN |
| | | AAPIVGAVNSQGALPGMVWQNRDVYLQGPIWAKIPHTDGNFHPSPLMGGFGLKHPPPQI |
| | | LIKNTPVPADPPTTFSQAKLASFITQYSTGQVSVEIEWELQKENSKRWNPEIQYTSNYY |
| | | KSTNVDFAVNTDGTYSEPRPIGTRYLTRNL |
| | | ATGGCTGCCGATGGTTATCTTCCAGATTGGCTCGAGGACAACCTCTCTGAGGGCATTCG |
| | | CGAGTGGTGGGACTTGAAACCTGGAGCCCCGAAACCCAAAGCCAACCAGCAAAAGCAGG |
| | | ACGACGGCCGGGGTCTGGTGCTTCCTGGCTACAAGTACCTCGGACCCTTCAACGGACTC |
| | | GACAAGGGGGAGCCCGTCAACGCGGCGGACGCAGCGGCCCTCGAGCACGACAAGGCCTA |
| | | CGACCAGCAGCTCAAAGCGGGTGACAATCCGTACCTGCGGTATAACCACGCCGACGCCG |
| | | AGTTTCAGGAGCGTCTGCAAGAAGATACGTCTTTTGGGGGCAACCTCGGGCGAGCAGTC |
| | | TTCCAGGCCAAGAAGCGGGTTCTCGAACCTCTCGGTCTGGTTGAGGAAGGCGCTAAGAC |
| | | GGCTCCTGGAAAGAAGAGACCGGTAGAGCCATCACCCCAGCGTTCTCCAGACTCCTCTA |
| | | CGGGCATCGGCAAGAAAGGCCAGCAGCCCGCGAAAAAGAGACTCAACTTTGGGCAGACT |
| | | GGCGACTCAGAGTCAGTGCCCGACCCTCAACCAATCGGAGAACCCCCCGCAGGCCCCTC |
| | | TGGTCTGGGATCTGGTACAATGGCTGCAGGCGGTGGCGCTCCAATGGCAGACAATAACG |
| | | AAGGCGCCGACGGAGTGGGTAGTTCCTCAGGAAATTGGCATTGCGATTCCACATGGCTG |
| | | GGCGACAGAGTCATCACCACCAGCACCCGAACCTGGGCCCTCCCCACCTACAACAACCA |
| | | CCTCTACAAGCAAATCTCCAACGGGACTTCGGGAGGAAGCACCAACGACAACACCTACT |
| AAVrh10 | 15 | TCGGCTACAGCACCCCCTGGGGGTATTTTGACTTTAACAGATTCCACTGCCACTTCTCA |
| (DNA) | | CCACGTGACTGGCAGCGACTCATCAACAACAACTGGGGATTCCGGCCCAAGAGACTCAA |
| | | CTTCAAGCTCTTCAACATCCAGGTCAAGGAGGTCACGCAGAATGAAGGCACCAAGACCA |
| | | TCGCCAATAACCTTACCAGCACGATTCAGGTCTTTACGGACTCGGAATACCAGCTCCCG |
| | | TACGTCCTCGGCTCTGCGCACCAGGGCTGCCTGCCTCCGTTCCCGGCGGACGTCTTCAT |
| | | GATTCCTCAGTACGGGTACCTGACTCTGAACAATGGCAGTCAGGCCGTGGGCCGTTCCT |
| | | CCTTCTACTGCCTGGAGTACTTTCCTTCTCAAATGCTGAGAACGGGCAACAACTTTGAG |
| | | TTCAGCTACCAGTTTGAGGACGTGCCTTTTCACAGCAGCTACGCGCACAGCCAAAGCCT |
| | | GGACCGGCTGATGAACCCCCTCATCGACCAGTACCTGTACTACCTGTCTCGGACTCAGT |
| | | CCACGGGAGGTACCGCAGGAACTCAGCAGTTGCTATTTTCTCAGGCCGGGCCTAATAAC |
| | | ATGTCGGCTCAGGCCAAAAACTGGCTACCCGGGCCCTGCTACCGGCAGCAACGCGTCTC |
| | | CACGACACTGTCGCAAAATAACAACAGCAACTTTGCCTGGACCGGTGCCACCAAGTATC |
| | | ATCTGAATGGCAGAGACTCTCTGGTAAATCCCGGTGTCGCTATGGCAACCCACAAGGAC |
| | | GACGAAGAGCGATTTTTTCCGTCCAGCGGAGTCTTAATGTTTGGGAAACAGGGAGCTGG |
| | | AAAAGACAACGTGGACTATAGCAGCGTTATGCTAACCAGTGAGGAAGAAATTAAAACCA |
| | | CCAACCCAGTGGCCACAGAACAGTACGGCGTGGTGGCCGATAACCTGCAACAGCAAAAC |
| | | GCCGCTCCTATTGTAGGGGCCGTCAACAGTCAAGGAGCCTTACCTGGCATGGTCTGGCA |
| | | GAACCGGGACGTGTACCTGCAGGGTCCTATCTGGGCCAAGATTCCTCACACGGACGGAA |
| | | ACTTTCATCCCTCGCCGCTGATGGGAGGCTTTGGACTGAAACACCCGCCTCCTCAGATC |
| | | CTGATTAAGAATACACCTGTTCCCGCGGATCCTCCAACTACCTTCAGTCAAGCTAAGCT |
| | | GGCGTCGTTCATCACGCAGTACAGCACCGGACAGGTCAGCGTGGAAATTGAATGGGAGC |
| | | TGCAGAAAGAAAACAGCAAACGCTGGAACCCAGAGATTCAATACACTTCCAACTACTAC |
| | | AAATCTACAAATGTGGACTTTGCTGTTAACACAGATGGCACTTATTCTGAGCCTCGCCC |
| | | CATCGGCACCCGTTACCTCACCCGTAATCTGTAA |
| AAV2 | 16 | MAADGYLPDWLEDTLSEGIRQWWKLKPGPPPPKPAERHKDDSRGLVLPGYKYLGPFNGL |
| (amino acid) | | DKGEPVNEADAAALEHDKAYDRQLDSGDNPYLKYNHADAEFQERLKEDTSFGGNLGRAV |
| | | FQAKKRVLEPLGLVEEPVKTAPGKKRPVEHSPVEPDSSSGTGKAGQQPARKRLNFGQTG |
| | | DADSVPDPQPLGQPPAAPSGLGTNTMATGSGAPMADNNEGADGVGNSSGNWHCDSTWMG |
| | | DRVITTSTRTWALPTYNNHLYKQISSQSGASNDNHYFGYSTPWGYFDFNRFHCHFSPRD |
| | | WQRLINNNWGFRPKRLNFKLFNIQVKEVTQNDGTTTIANNLTSTVQVFTDSEYQLPYVL |
| | | GSAHQGCLPPFPADVFMVPQYGYLTLNNGSQAVGRSSFYCLEYFPSQMLRTGNNFTFSY |
| | | TFEDVPFHSSYAHSQSLDRLMNPLIDQYLYYLSRTNTPSGTTTQSRLQFSQAGASDIRD |
| | | QSRNWLPGPCYRQQRVSKTSADNNNSEYSWTGATKYHLNGRDSLVNPGPAMASHKDDEE |
| | | KFFPQSGVLIFGKQGSEKTNVDIEKVMITDEEEIRTTNPVATEQYGSVSTNLQRGNRQA |
| | | ATADVNTQGVLPGMVWQDRDVYLQGPIWAKIPHTDGHFHPSPLMGGFGLKHPPPQILIK |
| | | NTPVPANPSTTFSAAKFASFITQYSTGQVSVEIEWELQKENSKRWNPEIQYTSNYNKSV |
| | | NVDFTVDINGVYSEPRPIGTRYLTRNL |
| AAV2 | 17 | ATGGCTGCCGATGGTTATCTTCCAGATTGGCTCGAGGACACTCTCTCTGAAGGAATAAG |
| (DNA) | | ACAGTGGTGGAAGCTCAAACCTGGCCCACCACCACCAAAGCCCGCAGAGCGGCATAAGG |
| | | ACGACAGCAGGGGTCTTGTGCTTCCTGGGTACAAGTACCTCGGACCCTTCAACGGACTC |
| | | GACAAGGGAGAGCCGGTCAACGAGGCAGACGCCGCGGCCCTCGAGCACGACAAAGCCTA |
| | | CGACCGGCAGCTCGACAGCGGAGACAACCCGTACCTCAAGTACAACCACGCCGACGCGG |
| | | AGTTTCAGGAGCGCCTTAAAGAAGATACGTCTTTTGGGGGCAACCTCGGACGAGCAGTC |
| | | TTCCAGGCGAAAAAGAGGGTTCTTGAACCTCTGGGCCTGGTTGAGGAACCTGTTAAGAC |
| | | GGCTCCGGGAAAAAAGAGGCCGGTAGAGCACTCTCCTGTGGAGCCAGACTCCTCCTCGG |
| | | GAACCGGAAAGGCGGGCCAGCAGCCTGCAAGAAAAAGATTGAATTTTGGTCAGACTGGA |
| | | GACGCAGACTCAGTACCTGACCCCCAGCCTCTCGGACAGCCACCAGCAGCCCCCTCTGG |
| | | TCTGGGAACTAATACGATGGCTACAGGCAGTGGCGCACCAATGGCAGACAATAACGAGG |
| | | GCGCCGACGGAGTGGGTAATTCCTCGGGAAATTGGCATTGCGATTCCACATGGATGGGC |
| | | GACAGAGTCATCACCACCAGCACCCGAACCTGGGCCCTGCCCACCTACAACAACCACCT |
| | | CTACAAACAAATTTCCAGCCAATCAGGAGCCTCGAACGACAATCACTACTTTGGCTACA |
| | | GCACCCCTTGGGGGTATTTTGACTTCAACAGATTCCACTGCCACTTTTCACCACGTGAC |
| | | TGGCAAAGACTCATCAACAACAACTGGGGATTCCGACCCAAGAGACTCAACTTCAAGCT |
| | | CTTTAACATTCAAGTCAAAGAGGTCACGCAGAATGACGGTACGACGACGATTGCCAATA |
| | | ACCTTACCAGCACGGTTCAGGTGTTTACTGACTCGGAGTACCAGCTCCCGTACGTCCTC |
| | | GGCTCGGCGCATCAAGGATGCCTCCCGCCGTTCCCAGCAGACGTCTTCATGGTGCCACA |
| | | GTATGGATACCTCACCCTGAACAACGGGAGTCAGGCAGTAGGACGCTCTTCATTTTACT |
| | | GCCTGGAGTACTTTCCTTCTCAGATGCTGCGTACCGGAAACAACTTTACCTTCAGCTAC |
| | | ACTTTTGAGGACGTTCCTTTCCACAGCAGCTACGCTCACAGCCAGAGTCTGGACCGTCT |
| | | CATGAATCCTCTCATCGACCAGTACCTGTATTACTTGAGCAGAACAAACACTCCAAGTG |
| | | GAACCACCACGCAGTCAAGGCTTCAGTTTTCTCAGGCCGGAGCGAGTGACATTCGGGAC |
| | | CAGTCTAGGAACTGGCTTCCTGGACCCTGTTACCGCCAGCAGCGAGTATCAAAGACATC |
| | | TGCGGATAACAACAACAGTGAATACTCGTGGACTGGAGCTACCAAGTACCACCTCAATG |
| | | GCAGAGACTCTCTGGTGAATCCGGGCCCGGCCATGGCAAGCCACAAGGACGATGAAGAA |
| | | AAGTTTTTTCCTCAGAGCGGGGTTCTCATCTTTGGGAAGCAAGGCTCAGAGAAAACAAA |
| | | TGTGGACATTGAAAAGGTCATGATTACAGACGAAGAGGAAATCAGGACAACCAATCCCG |
| | | TGGCTACGGAGCAGTATGGTTCTGTATCTACCAACCTCCAGAGAGGCAACAGACAAGCA |
| | | GCTACCGCAGATGTCAACACACAAGGCGTTCTTCCAGGCATGGTCTGGCAGGACAGAGA |
| | | TGTGTACCTTCAGGGGCCCATCTGGGCAAAGATTCCACACACGGACGGACATTTTCACC |
| | | CCTCTCCCCTCATGGGTGGATTCGGACTTAAACACCCTCCTCCACAGATTCTCATCAAG |
| | | AACACCCCGGTACCTGCGAATCCTTCGACCACCTTCAGTGCGGCAAAGTTTGCTTCCTT |
| | | CATCACACAGTACTCCACGGGACAGGTCAGCGTGGAGATCGAGTGGGAGCTGCAGAAGG |
| | | AAAACAGCAAACGCTGGAATCCCGAAATTCAGTACACTTCCAACTACAACAAGTCTGTT |
| | | AATGTGGACTTTACTGTGGACACTAATGGCGTGTATTCAGAGCCTCGCCCCATTGGCAC |
| | | CAGATACCTGACTCGTAATCTGTAA |
| AAV1 | 18 | MAADGYLPDWLEDNLSEGIREWWDLKPGAPKPKANQQKQDDGRGLVLPGYKYLGPFNGL |
| (amino acid) | | DKGEPVNAADAAALEHDKAYDQQLKAGDNPYLRYNHADAEFQERLQEDTSEGGNLGRAV |
| | | FQAKKRVLEPLGLVEEGAKTAPGKKRPVEQSPQEPDSSSGIGKTGQQPAKKRLNFGQTG |
| | | DSESVPDPQPLGEPPATPAAVGPTTMASGGGAPMADNNEGADGVGNASGNWHCDSTWLG |
| | | DRVITTSTRTWALPTYNNHLYKQISSASTGASNDNHYFGYSTPWGYFDFNRFHCHFSPR |
| | | DWQRLINNNWGFRPKRLNFKLFNIQVKEVTTNDGVTTIANNLTSTVQVFSDSEYQLPYV |
| | | LGSAHQGCLPPFPADVFMIPQYGYLTLNNGSQAVGRSSFYCLEYFPSQMLRTGNNFTFS |
| | | YTFEEVPFHSSYAHSQSLDRLMNPLIDQYLYYLNRTQNQSGSAQNKDLLFSRGSPAGMS |
| | | VQPKNWLPGPCYRQQRVSKTKTDNNNSNFTWTGASKYNLNGRESIINPGTAMASHKDDE |
| | | DKFFPMSGVMIFGKESAGASNTALDNVMITDEEEIKATNPVATERFGTVAVNFQSSSTD |
| | | PATGDVHAMGALPGMVWQDRDVYLQGPIWAKIPHTDGHFHPSPLMGGFGLKNPPPQILI |
| | | KNTPVPANPPAEFSATKFASFITQYSTGQVSVEIEWELQKENSKRWNPEVQYTSNYAKS |
| | | ANVDFTVDNNGLYTEPRPIGTRYLTRPL |
| AAV1 | 19 | atggctgccgatggttatcttccagattggctcgaggacaacctctctgagggcattcg |
| (DNA) | | cgagtggtgggacttgaaacctggagccccgaagcccaaagccaaccagcaaaagcagg |
| | | acgacggccggggtctggtgcttcctggctacaagtacctcggacccttcaacggactc |
| | | gacaagggggagcccgtcaacgcggcggacgcagcggccctcgagcacgacaaggccta |
| | | cgaccagcagctcaaagcgggtgacaatccgtacctgcggtataaccacgccgacgccg |
| | | agtttcaggagcgtctgcaagaagatacgtcttttgggggcaacctcgggcgagcagtc |
| | | ttccaggccaagaagcgggttctcgaacctctcggtctggttgaggaaggcgctaagac |
| | | ggctcctggaaagaaacgtccggtagagcagtcgccacaagagccagactcctcctcgg |
| | | gcatcggcaagacaggccagcagcccgctaaaaagagactcaattttggtcagactggc |
| | | gactcagagtcagtccccgatccacaacctctcggagaacctccagcaacccccgctgc |
| | | tgtgggacctactacaatggcttcaggcggtggcgcaccaatggcagacaataacgaag |
| | | gcgccgacggagtgggtaatgcctcaggaaattggcattgcgattccacatggctgggc |
| | | gacagagtcatcaccaccagcacccgcacctgggccttgcccacctacaataaccacct |
| | | ctacaagcaaatctccagtgcttcaacgggggccagcaacgacaaccactacttcggct |
| | | acagcaccccctgggggtattttgatttcaacagattccactgccacttttcaccacgt |
| | | gactggcagcgactcatcaacaacaattggggattccggcccaagagactcaacttcaa |
| | | actcttcaacatccaagtcaaggaggtcacgacgaatgatggcgtcacaaccatcgcta |
| | | ataaccttaccagcacggttcaagtcttctcggactcggagtaccagcttccgtacgtc |
| | | ctcggctctgcgcaccagggctgcctccctccgttcccggcggacgtgttcatgattcc |
| | | gcaatacggctacctgacgctcaacaatggcagccaagccgtgggacgttcatcctttt |
| | | actgcctggaatatttcccttctcagatgctgagaacgggcaacaactttaccttcagc |
| | | tacacctttgaggaagtgcctttccacagcagctacgcgcacagccagagcctggaccg |
| | | gctgatgaatcctctcatcgaccaatacctgtattacctgaacagaactcaaaatcagt |
| | | ccggaagtgcccaaaacaaggacttgctgtttagccgtgggtctccagctggcatgtct |
| | | gttcagcccaaaaactggctacctggaccctgttatcggcagcagcgcgtttctaaaac |
| | | aaaaacagacaacaacaacagcaattttacctggactggtgcttcaaaatataacctca |
| | | atgggcgtgaatccatcatcaaccctggcactgctatggcctcacacaaagacgacgaa |
| | | gacaagttctttcccatgagcggtgtcatgatttttggaaaagagagcgccggagcttc |
| | | aaacactgcattggacaatgtcatgattacagacgaagaggaaattaaagccactaacc |
| | | ctgtggccaccgaaagatttgggaccgtggcagtcaatttccagagcagcagcacagac |
| | | cctgcgaccggagatgtgcatgctatgggagcattacctggcatggtgtggcaagatag |
| | | agacgtgtacctgcagggtcccatttgggccaaaattcctcacacagatggacactttc |
| | | acccgtctcctcttatgggcggctttggactcaagaacccgcctcctcagatcctcatc |
| | | aaaaacacgcctgttcctgcgaatcctccggcggagttttcagctacaaagtttgcttc |
| | | attcatcacccaatactccacaggacaagtgagtgtggaaattgaatgggagctgcaga |
| | | aagaaaacagcaagcgctggaatcccgaagtgcagtacacatccaattatgcaaaatct |
| | | gccaacgttgattttactgtggacaacaatggactttatactgagcctcgccccattgg |
| | | cacccgttaccttacccgtcccctgtaa |
| AAV5 | 20 | MSFVDHPPDWLEEVGEGLREFLGLEAGPPKPKPNQQHQDQARGLVLPGYNYLGPGNGLD |
| (amino acid) | | RGEPVNRADEVAREHDISYNEQLEAGDNPYLKYNHADAEFQEKLADDTSFGGNLGKAVF |
| | | QAKKRVLEPFGLVEEGAKTAPTGKRIDDHFPKRKKARTEEDSKPSTSSDAEAGPSGSQQ |
| | | LQIPAQPASSLGADTMSAGGGGPLGDNNQGADGVGNASGDWHCDSTWMGDRVVTKSTRT |
| | | WVLPSYNNHQYREIKSGSVDGSNANAYFGYSTPWGYFDFNRFHSHWSPRDWQRLINNYW |
| | | GFRPRSLRVKIFNIQVKEVTVQDSTTTIANNLTSTVQVFTDDDYQLPYVVGNGTEGCLP |
| | | AFPPQVFTLPQYGYATLNRDNTENPTERSSFFCLEYFPSKMLRTGNNFEFTYNFEEVPF |
| | | HSSFAPSQNLFKLANPLVDQYLYRFVSTNNTGGVQFNKNLAGRYANTYKNWFPGPMGRT |
| | | QGWNLGSGVNRASVSAFATTNRMELEGASYQVPPQPNGMTNNLQGSNTYALENTMIFNS |
| | | QPANPGTTATYLEGNMLITSESETQPVNRVAYNVGGQMATNNQSSTTAPATGTYNLQEI |
| | | VPGSVWMERDVYLQGPIWAKIPETGAHFHPSPAMGGFGLKHPPPMMLIKNTPVPGNITS |
| | | FSDVPVSSFITQYSTGQVTVEMEWELKKENSKRWNPEIQYTNNYNDPQFVDFAPDSTGE |
| | | YRTTRPIGTRYLTRPL |
| AAV5 | 21 | atgtcttttgttgatcaccctccagattggttggaagaagttggtgaaggtcttcgcga |
| (DNA) | | gtttttgggccttgaagcgggcccaccgaaaccaaaacccaatcagcagcatcaagatc |
| | | aagcccgtggtcttgtgctgcctggttataactatctcggacccggaaacggtctcgat |
| | | cgaggagagcctgtcaacagggcagacgaggtcgcgcgagagcacgacatctcgtacaa |
| | | cgagcagcttgaggcgggagacaacccctacctcaagtacaaccacgcggacgccgagt |
| | | ttcaggagaagctcgccgacgacacatccttcgggggaaacctcggaaaggcagtcttt |
| | | caggccaagaaaagggttctcgaaccttttggcctggttgaagagggtgctaagacggc |
| | | ccctaccggaaagcggatagacgaccactttccaaaaagaaagaaggcccggaccgaag |
| | | aggactccaagccttccacctcgtcagacgccgaagctggacccagcggatcccagcag |
| | | ctgcaaatcccagcccaaccagcctcaagtttgggagctgatacaatgtctgcgggagg |
| | | tggcggcccattgggcgacaataaccaaggtgccgatggagtgggcaatgcctcgggag |
| | | attggcattgcgattccacgtggatgggggacagagtcgtcaccaagtccacccgaacc |
| | | tgggtgctgcccagctacaacaaccaccagtaccgagagatcaaaagcggctccgtcga |
| | | cggaagcaacgccaacgcctactttggatacagcaccccctgggggtactttgacttta |
| | | accgcttccacagccactggagcccccgagactggcaaagactcatcaacaactactgg |
| | | ggcttcagaccccggtccctcagagtcaaaatcttcaacattcaagtcaaagaggtcac |
| | | ggtgcaggactccaccaccaccatcgccaacaacctcacctccaccgtccaagtgttta |
| | | cggacgacgactaccagctgccctacgtcgtcggcaacgggaccgagggatgcctgccg |
| | | gccttccctccgcaggtctttacgctgccgcagtacggttacgcgacgctgaaccgcga |
| | | caacacagaaaatcccaccgagaggagcagcttcttctgcctagagtactttcccagca |
| | | agatgctgagaacgggcaacaactttgagtttacctacaactttgaggaggtgcccttc |
| | | cactccagcttcgctcccagtcagaacctcttcaagctggccaacccgctggtggacca |
| | | gtacttgtaccgcttcgtgagcacaaataacactggcggagtccagttcaacaagaacc |
| | | tggccgggagatacgccaacacctacaaaaactggttcccggggcccatgggccgaacc |
| | | cagggctggaacctgggctccggggtcaaccgcgccagtgtcagcgccttcgccacgac |
| | | caataggatggagctcgagggcgcgagttaccaggtgcccccgcagccgaacggcatga |
| | | ccaacaacctccagggcagcaacacctatgccctggagaacactatgatcttcaacagc |
| | | cagccggcgaacccgggcaccaccgccacgtacctcgagggcaacatgctcatcaccag |
| | | cgagagcgagacgcagccggtgaaccgcgtggcgtacaacgtcggcgggcagatggcca |
| | | ccaacaaccagagctccaccactgcccccgcgaccggcacgtacaacctccaggaaatc |
| | | gtgcccggcagcgtgtggatggagagggacgtgtacctccaaggacccatctgggccaa |
| | | gatcccagagacgggggcgcactttcacccctctccggccatgggggattcggactca |
| | | aacacccaccgcccatgatgctcatcaagaacacgcctgtgcccggaaatatcaccagc |
| | | ttctcggacgtgcccgtcagcagcttcatcacccagtacagcaccgggcaggtcaccgt |
| | | ggagatggagtgggagctcaagaaggaaaactccaagaggtggaacccagagatccagt |
| | | acacaaacaactacaacgacccccagtttgtggactttgccccggacagcaccggggaa |
| | | tacagaaccaccagacctatcggaacccgataccttacccgacccctttaa |

[1098] In some embodiments, the AAV capsid polypeptide, e.g., the AAV capsid variant, comprises the amino acid sequence of any of SEQ ID NOs: 1, 11, 138, 12, 13, 14, 16, 18, 20, or an amino acid sequence substantially identical (e.g., having at least 70%, 75%, 80%, 85%, 90%, 92%, 95%, 97%, 98%, or 99% sequence identity) thereto. In some embodiments the AAV capsid polypeptide, e.g., the AAV capsid variant, comprises an amino acid sequence comprising at least one, two, or three modifications, e.g., substitutions (e.g., conservative substitutions), insertions, or deletions, but no more than 30, 20, or 10 modifications, e.g., substitutions (e.g., conservative substitutions), insertions, or deletions, relative to the amino acid sequence of any of SEQ ID NOs: 1, 11, 138, 12, 13, 14, 16, 18, 20. In some embodiments, the AAV capsid polypeptide, e.g., the AAV capsid variant, comprises an amino acid sequence encoded by the nucleotide sequence of any of SEQ ID NOs: 137, 15, 17, 19, 21, or a nucleotide sequence substantially identical (e.g., having at least 70%, 75%, 80%, 85%, 90%, 92%, 95%, 97%, 98%, or 99% sequence identity) thereto.

[1099] In some embodiments, the nucleotide sequence encoding the AAV capsid polypeptide, e.g., the AAV capsid variant, comprises the nucleotide sequence of any of SEQ ID NOs: 137, 15, 17, 19, or 21, or a nucleotide sequence substantially identical (e.g., having at least 70%, 75%, 80%, 85%, 90%, 92%, 95%, 97%, 98%, or 99% sequence identity) thereto. In some embodiments, the nucleotide sequence encoding the AAV capsid polypeptide, e.g., the AAV capsid variant, comprises a nucleotide sequence comprising at least one, two, or three modifications, e.g., substitutions (e.g., conservative substitutions), insertions, or deletions, but no more than 30, 20, or 10 modifications, e.g., substitutions (e.g., conservative substitutions), insertions, or deletions, relative to the nucleotide sequence of any of SEQ ID NOs: 137, 15, 17, 19, or 21.

[1100] In some embodiments, the AAV capsid polypeptide, e.g., the AAV capsid variant, comprises the amino acid sequence of SEQ ID NO: 138 or an amino acid sequence substantially identical (e.g., having at least 70%, 75%, 80%, 85%, 90%, 92%, 95%, 97%, 98%, or 99% sequence identity) thereto. In some embodiments the AAV capsid polypeptide, e.g., the AAV capsid variant, comprises an amino acid sequence comprising at least one, two, or three modifications, e.g., substitutions (e.g., conservative substitutions), but no more than 30, 20, or 10 modifications, e.g., substitutions (e.g., conservative substitutions), relative to the amino acid sequence of SEQ ID NO: 138. In some embodiments, the AAV capsid polypeptide, e.g., the AAV capsid variant, comprises an amino acid sequence encoded by the nucleotide sequence of SEQ ID NO: 137 or a nucleotide sequence substantially identical (e.g., having at least 70%, 75%, 80%, 85%, 90%, 92%, 95%, 97%, 98%, or 99% sequence identity) thereto. In some embodiments, the nucleotide sequence encoding the AAV capsid polypeptide, e.g., the AAV capsid variant, comprises the nucleotide sequence of SEQ ID NO: 137 or a nucleotide sequence substantially identical (e.g., having at least 70%, 75%, 80%, 85%, 90%, 92%, 95%, 97%, 98%, or 99% sequence identity) thereto. In some embodiments, the AAV capsid polypeptide, e.g., the AAV capsid variant, comprises substitution at position K449, e.g., a K449R substitution, numbered according to SEQ ID NO: 138.

[1101] In some embodiments, the AAV capsid polypeptide, e.g., the AAV capsid variant, comprises a peptide comprising the amino acid sequence of TLAVPFK (SEQ ID NO: 1262). In some embodiments, the peptide is present immediately subsequent to position 588, relative to a reference sequence numbered according to SEQ ID NO: 138. In some embodiments, the capsid polypeptide comprises the amino acid substitutions of A587D and Q588G, numbered according to SEQ ID NO: 138.

[1102] In some embodiments, the AAV capsid polypeptide, e.g., the AAV capsid variant, comprises the amino acid substitution of K449R, numbered according to SEQ ID NO: 138; and a peptide comprising the amino acid sequence of TLAVPFK (SEQ ID NO: 1262), wherein the peptide is present immediately subsequent to position 588, relative to a reference sequence numbered according to SEQ ID NO: 138.

[1103] In some embodiments, the AAV capsid polypeptide, e.g., the AAV capsid variant, comprises the amino acid substitution of K449R, numbered according to SEQ ID NO: 138; an peptide comprising the amino acid sequence of TLAVPFK (SEQ ID NO: 1262), wherein the insert is present immediately subsequent to position 588, relative to a reference sequence numbered according to SEQ ID NO: 138; and the amino acid substitutions of A587D and Q588G, numbered according to SEQ ID NO: 138.

[1104] In some embodiments, the AAV capsid polypeptide, e.g., the AAV capsid variant, comprises a peptide comprising the amino acid sequence of TLAVPFK (SEQ ID NO: 1262), wherein the insert is present immediately subsequent to position 588, relative to a reference sequence numbered according to SEQ ID NO: 138; and the amino acid substitutions of A587D and Q588G, numbered according to SEQ ID NO: 138.

[1105] In some embodiments, the AAV capsid polypeptide, e.g., the AAV capsid variant, comprises the amino acid sequence of SEQ ID NO: 11 or an amino acid sequence substantially identical (e.g., having at least 70%, 75%, 80%, 85%, 90%, 92%, 95%, 97%, 98%, or 99% sequence identity) thereto. In some embodiments the AAV capsid polypeptide, e.g., the AAV capsid variant, comprises an amino acid sequence comprising at least one, two, or three modifications, e.g., substitutions (e.g., conservative substitutions), but no more than 30, 20, or 10 modifications, e.g., substitutions (e.g., conservative substitutions), relative to the amino acid sequence of SEQ ID NO: 11, optionally wherein position 449 is not R.

[1106] In some embodiments, the capsid polypeptide, comprises the amino acid sequence of SEQ ID NO: 1 or an amino acid sequence substantially identical (e.g., having at least 70%, 75%, 80%, 85%, 90%, 92%, 95%, 97%, 98%, or 99% sequence identity) thereto. In some embodiments the AAV capsid polypeptide, e.g., the AAV capsid variant, comprises an amino acid sequence comprising at least one, two, or three modifications, e.g., substitutions (e.g., conservative substitutions), but no more than 30, 20, or 10 modifications, e.g., substitutions (e.g., conservative substitutions), relative to the amino acid sequence of SEQ ID NO: 1.

[1107] In some embodiments, an AAV capsid variant disclosed herein comprises a modification in loop VIII of AAV9, e.g., at positions between 580-599, e.g., at positions 587, 588, 589, and/or 590, numbered relative to SEQ ID NO: 5, 8, 138 or 3636-3647. In some embodiments, loop (e.g., loop VIII) is used interchangeably herein with the term variable region (e.g., variable region VIII), or VR (e.g., VR-VIII). In some embodiments loop VIII comprises positions 580-599 (e.g., amino acids VATNHQSAQAQAQTGWVQNQ (SEQ ID NO: 1195), numbered according to SEQ ID NO: 138. In some embodiments, loop VIII comprises positions 582-593 (e.g., amino acids TNHQSAQAQAQT (SEQ ID NO: 1196), numbered according to SEQ ID NO: 138. In some embodiments loop VIII comprises positions 587-593 (e.g., amino acids AQAQAQT (SEQ ID NO: 1197), numbered according to SEQ ID NO: 138. In some embodiments loop VIII comprises positions 587-590 (e.g., amino acids AQAQ, SEQ ID NO: 3759), numbered according to SEQ ID NO: 138. In some embodiments, loop VIII or variable region VIII (VR-VIII) is as described in DiMattia et al. “Structural Insights into the Unique Properties of the Adeno-Associated Virus Serotype 9,” Journal of Virology, 12(86):6947-6958 (the contents of which are hereby incorporated by reference in their entirety), e.g., comprising positions 581-593 (e.g., ATNHQSAQAQAQT (SEQ ID NO: 1198), numbered according to SEQ ID NO: 138.

[1108] In some embodiments, an AAV particle described herein comprises an AAV capsid polypeptide, e.g., an AAV capsid variant. In some embodiments, the AAV capsid polypeptide, e.g., the AAV capsid variant, comprises a peptide sequence as described in Table 3, e.g., any one of peptides 1, 2, 3, 4, 5, 6, 7, 8, 9, 10, 11, or 12. In some embodiments, the peptide may increase distribution of an AAV particle to a cell, region, or tissue of the CNS. The cell of the CNS may be, but is not limited to, neurons (e.g., excitatory, inhibitory, motor, sensory, autonomic, sympathetic, parasympathetic, Purkinje, Betz, etc.), glial cells (e.g., microglia, astrocytes, oligodendrocytes) and/or supporting cells of the brain such as immune cells (e.g., T cells). The tissue of the CNS may be, but is not limited to, the cortex (e.g., frontal, parietal, occipital, temporal), thalamus, hypothalamus, striatum, putamen, caudate nucleus, hippocampus, entorhinal cortex, basal ganglia, or deep cerebellar nuclei. In some embodiments, the peptide may increase biodistribution of an AAV particle to a cell, region, or tissue of the PNS. The cell or tissue of the PNS may be, but is not limited to, a dorsal root ganglion (DRG). In some embodiments, the peptide may increase biodistribution of an AAV particle to the CNS (e.g., the cortex) after intravenous administration. In some embodiments, the peptide may increase biodistribution of an AAV particle to the CNS (e.g., the cortex) following focused ultrasound (FUS), e.g., coupled with the intravenous administration of microbubbles (FUS-MB), or MRI-guided FUS coupled with intravenous administration. In some embodiments, the peptide may increase biodistribution of an AAV particle to the PNS (e.g., DRG) after intravenous administration. In some embodiments, the peptide may increase biodistribution of an AAV particle to the PNS (e.g., DRG) following focused ultrasound (FUS), e.g., coupled with the intravenous administration of microbubbles (FUS-MB), or MRI-guided FUS coupled with intravenous administration. In some embodiments, the peptide may increase biodistribution of an AAV particle to a cell, region, or tissue of a muscle. In some embodiments, the muscle is a heart muscle. In some embodiments, the peptide may direct an AAV particle to a muscle cell, region, or tissue after intravenous administration.

TABLE 3
Exemplary Peptide Sequences

| | SEQ | Amino | SEQ | |
|---|---|---|---|---|
| Pep- | ID | Acid | ID | Nucleotide |
| tide | NO: | Sequence | NO: | Sequence |
| 1 | 3648 | PLNGAVHLY | 3660 | ccgcttaatggtgcc |
| | | | | gtccatctttat |
| 2 | 3649 | RDSPKGW | 3661 | cgtgattctccgaag |
| | | | | ggttggca |
| 3 | 3650 | YSTDVRM | 3662 | tattctacggatgtg |
| | | | | aggatgca |
| 4 | 3651 | IVMNSLK | 3663 | attgttatgaattcg |
| | | | | ttgaaggc |
| 5 | 3652 | RESPRGL | 3664 | cgggagagtcctcgt |
| | | | | gggctgca |
| 6 | 3653 | SFNDTRA | 3665 | agttttaatgatact |
| | | | | agggctca |
| 7 | 3654 | GGTLAVVSL | 3666 | ggtggtacgttggcc |
| | | | | gtcgtgtcgctt |
| 8 | 3655 | YGLPKGP | 3667 | tatgggttgccgaag |
| | | | | ggtcct |
| 9 | 3656 | STGTLRL | 3668 | tcgactgggacgctt |
| | | | | cggctt |
| 10 | 3657 | YSTDERM | 3669 | tattcgacggatgag |
| | | | | aggatg |
| 11 | 3658 | YSTDERK | 3670 | tattcgacggatgag |
| | | | | aggaag |
| 12 | 3659 | YVSSVKM | 3671 | tatgtttcgtctgtt |
| | | | | aagatg |

[1109] In some embodiments, the AAV capsid polypeptide, e.g., the AAV capsid variant, comprises at least 3, 4, 5, 6, 7, 8, or 9 consecutive amino acids from the amino acid sequence of any of SEQ ID NO: 3648-3659. In some embodiments, the amino acid sequence is present in loop VIII. In some embodiments, the amino acid sequence is present immediately subsequent to position 586, 588, or 589, relative to a reference sequence numbered according to the amino acid sequence of SEQ ID NO: 138.

[1110] In some embodiments, the AAV capsid polypeptide, e.g., the AAV capsid variant, comprises an amino acid sequence comprising at least one, two, or three but no more than four modifications, e.g., substitutions (e.g., conservative substitutions), relative to the amino acid sequence of any of SEQ ID NO: 3648-3659. In some embodiments, the amino acid sequence is present in loop VIII. In some embodiments, the amino acid sequence is present immediately subsequent to position 586, 588, or 589, relative to a reference sequence numbered according to the amino acid sequence of SEQ ID NO: 138.

[1111] In some embodiments, the AAV capsid polypeptide, e.g., the AAV capsid variant, comprises an amino acid sequence comprising at least one, two, or three but no more than four modifications, e.g., substitutions, (e.g., conservative substitutions), insertions, or deletions, relative to any of the amino acid sequence of Table 20. In some embodiments, the AAV capsid polypeptide, e.g., the AAV capsid variant, comprises an amino acid sequence comprising at least one, two, or three but no more than four different amino acids, relative to any of the amino acid sequence of Table 20. In some embodiments, the AAV capsid variant comprises an amino acid sequence comprising at least one, two, or three but no more than four modifications, e.g., substitutions, (e.g., conservative substitutions), insertions, or deletions, relative to the amino acid sequence of any of SEQ ID NO: 3648-3659. In some embodiments, the AAV capsid variant comprises an amino acid sequence comprising at least one, two, or three but no more than four different amino acids relative to the amino acid sequence of any of SEQ ID NO: 3648-3659. In some embodiments, the amino acid sequence is present in loop VIII. In some embodiments, the amino acid sequence is present immediately subsequent to position 586, 588, or 589, relative to a reference sequence numbered according to the amino acid sequence of SEQ ID NO: 138.

[1112] In some embodiments, the AAV capsid polypeptide, e.g., the AAV capsid variant, comprises at least 3, 4, 5, 6, 7, 8, or 9 consecutive amino acids from the amino acid sequence of any of SEQ ID NO: 3648-3659. In some embodiments, the 3 consecutive amino acids comprise PLN. In some embodiments, the 4 consecutive amino acids comprise PLNG (SEQ ID NO: 3678). In some embodiments, the 5 consecutive amino acids comprise PLNGA (SEQ ID NO: 3679). In some embodiments, the 6 consecutive amino acids comprise PLNGAV (SEQ ID NO: 3680). In some embodiments, the 7 consecutive amino acids comprise PLNGAVH (SEQ ID NO: 3681). In some embodiments, the 8 consecutive amino acids comprise PLNGAVHL (SEQ ID NO: 3682). In some embodiments, the 9 consecutive amino acids comprise PLNGAVHLY (SEQ ID NO: 3648).

[1113] In some embodiments, the four consecutive amino acids comprise NGAV (SEQ ID NO: 3683). In some embodiments, the four consecutive amino acids comprise GAVH (SEQ ID NO: 3684). In some embodiments, the five consecutive amino acids comprise NGAVH (SEQ ID NO: 3685). In some embodiments, the five consecutive amino acids comprise GAVHL (SEQ ID NO: 3686). In some embodiments, the five consecutive amino acids comprise AVHLY (SEQ ID NO: 3687). In some embodiments, the six consecutive amino acids comprise NGAVHL (SEQ ID NO: 3688). In some embodiments, the seven consecutive amino acids comprise NGAVHLY (SEQ ID NO: 3689).

[1114] In some embodiments, the 3 consecutive amino acids comprise YST. In some embodiments, the 4 consecutive amino acids comprise YSTD (SEQ ID NO: 3690). In some embodiments, the 5 consecutive amino acids comprise YSTDE (SEQ ID NO: 3691). In some embodiments, the 5 consecutive amino acids comprise YSTDV (SEQ ID NO: 3700). In some embodiments, the 6 consecutive amino acids comprise YSTDER (SEQ ID NO: 3692). In some embodiments, the 6 consecutive amino acids comprise YSTDVR (SEQ ID NO: 3701). In some embodiments, the 7 consecutive amino acids comprise YSTDERM (SEQ ID NO: 3657). In some embodiments, the 7 consecutive amino acids comprise YSTDERK (SEQ ID NO: 3658). In some embodiments, the 7 consecutive amino acids comprise YSTDVRM (SEQ ID NO: 3650).

[1115] In some embodiments, the 3 consecutive amino acids comprise IVM. In some embodiments, the 4 consecutive amino acids comprise IVMN (SEQ ID NO: 3693). In some embodiments, the 5 consecutive amino acids comprise IVMNS (SEQ ID NO: 3694). In some embodiments, the 6 consecutive amino acids comprise IVMNSL (SEQ ID NO: 3695). In some embodiments, the 7 consecutive amino acids comprise IVMNSLK (SEQ ID NO: 3651).

[1116] In some embodiments, the AAV capsid polypeptide, e.g., the AAV capsid variant, comprises an amino acid sequence comprising at least one, two, or three but no more than four modifications, e.g., substitutions (e.g., conservative substitutions), relative to the amino acid sequence of any of SEQ ID NO: 3648-3659. In some embodiments, the modification is a conservative substitution.

[1117] In some embodiments, the AAV capsid polypeptide, e.g., the AAV capsid variant, comprises the amino acid sequence of PLNGAVHLY (SEQ ID NO: 3648), an amino acid sequence comprising at least one, two, or three but no more than four modifications, e.g., substitutions (e.g., conservative substitutions), insertions, or deletions, relative to the amino acid sequence of PLNGAVHLY (SEQ ID NO: 3648), or an amino acid sequence comprising at least one, two, or three but no more than four different amino acids relative to the amino acid sequence of PLNGAVHLY (SEQ ID NO: 3648), optionally wherein position 7 is H.

[1118] In some embodiments, the AAV capsid polypeptide, e.g., the AAV capsid variant, comprises the amino acid sequence of RDSPKGW (SEQ ID NO: 3649), an amino acid sequence comprising at least one, two, or three modifications, e.g., substitutions (e.g., conservative substitutions), insertions, or deletions, but no more than four modifications, e.g., substitutions (e.g., conservative substitutions), insertions, or deletions, relative to the amino acid sequence of RDSPKGW (SEQ ID NO: 3649), or an amino acid sequence comprising at least one, two, or three but no more than four different amino acids relative to the amino acid sequence of RDSPKGW (SEQ ID NO: 3649).

[1119] In some embodiments, the AAV capsid polypeptide, e.g., the AAV capsid variant, comprises the amino acid sequence of IVMNSLK (SEQ ID NO: 3651), an amino acid sequence comprising at least one, two, or three modifications, e.g., substitutions (e.g., conservative substitutions), insertions, or deletions, but no more than four modifications, e.g., substitutions (e.g., conservative substitutions), insertions, or deletions, relative to the amino acid sequence of IVMNSLK (SEQ ID NO: 3651), or an amino acid sequence comprising at least one, two, or three but no more than four different amino acids relative to the amino acid sequence of IVMNSLK (SEQ ID NO: 3651).

[1120] In some embodiments, the AAV capsid polypeptide, e.g., the AAV capsid variant, comprises the amino acid sequence of YSTDVRM (SEQ ID NO: 3650), an amino acid sequence comprising at least one, two, or three modifications, e.g., substitutions (e.g., conservative substitutions), insertions, or deletions, but no more than four modifications, e.g., substitutions (e.g., conservative substitutions), insertions, or deletions, relative to the amino acid sequence of YSTDVRM (SEQ ID NO: 3650), or an amino acid sequence comprising at least one, two, or three but no more than four different amino acids relative to the amino acid sequence of YSTDVRM (SEQ ID NO: 3650).

[1121] In some embodiments, the AAV capsid polypeptide, e.g., the AAV capsid variant, comprises the amino acid sequence of RESPRGL (SEQ ID NO: 3652), a sequence comprising at least one, two, or three modifications, e.g., substitutions (e.g., conservative substitutions), insertions, or deletions, but no more than four modifications, e.g., substitutions (e.g., conservative substitutions), insertions, or deletions, relative to the amino acid sequence of RESPRGL (SEQ ID NO: 3652), or an amino acid sequence comprising at least one, two, or three but no more than four different amino acids relative to the amino acid sequence of RESPRGL (SEQ ID NO: 3652).

[1122] In some embodiments, the AAV capsid variant comprises the amino acid sequence of any of SEQ ID NO: 3648-3659. In some embodiments, the amino acid sequence is present in loop VIII of an AAV capsid variant described herein. In some embodiments, the AAV capsid variant comprises the amino acid sequence of SEQ ID NO: 3648. In some embodiments, the AAV capsid variant comprises the amino acid sequence of SEQ ID NO: 3649. In some embodiments, the AAV capsid variant comprises the amino acid sequence of SEQ ID NO: 3651. In some embodiments, the amino acid sequence is present immediately subsequent to position 586, relative to a reference sequence numbered according to the amino acid sequence of SEQ ID NO: 138. In some embodiments, the amino acid sequence is present immediately subsequent to position 588, relative to a reference sequence numbered according to the amino acid sequence of SEQ ID NO: 138. In some embodiments, the amino acid sequence is present immediately subsequent to position 589, relative to a reference sequence numbered according to the amino acid sequence of SEQ ID NO: 138.

[1123] In some embodiments, the AAV capsid polypeptide, e.g., the AAV capsid variant (e.g., an AAV capsid variant described herein), comprises an amino acid sequence encoded by the nucleotide sequence of any one of SEQ ID NOs: 3660-3671, or a nucleotide sequence substantially identical (e.g., having at least 70%, 75%, 80%, 85%, 90%, 92%, 95%, 97%, 98%, or 99% sequence identity) thereto. In some embodiments, the AAV capsid, e.g., an AAV capsid variant described herein, comprises an amino acid sequence encoded by a nucleotide sequence comprising at least one, two, three, four, five, six, or seven modifications, e.g., substitutions (e.g., conservative substitutions), insertions, or deletions, but no more than ten modifications, e.g., substitutions (e.g., conservative substitutions), insertions, or deletions, relative to the nucleotide sequences of any of SEQ ID NOs: 3660-3671. In some embodiments, the AAV capsid polypeptide, e.g., the AAV capsid variant (e.g., an AAV capsid variant described herein), comprises an amino acid sequence encoded by a nucleotide sequence comprising at least one, two, three, four, five, six, or seven, but no more than ten different nucleotides relative to the nucleotide sequence of any of SEQ ID NOs: 3660-3671.

[1124] In some embodiments, the AAV capsid polypeptide, e.g., the AAV capsid variant (e.g., an AAV capsid variant described herein), comprises an amino acid sequence encoded by the nucleotide sequence of any one of SEQ ID NOs: 3660-3671, or a nucleotide sequence substantially identical (e.g., having at least 70%, 75%, 80%, 85%, 90%, 92%, 95%, 97%, 98%, or 99% sequence identity) thereto. In some embodiments, the AAV capsid, e.g., an AAV capsid variant described herein, comprises an amino acid sequence encoded by a nucleotide sequence comprising at least one, two, three, four, five, six, or seven modifications, e.g., substitutions (e.g., conservative substitutions), insertions, or deletions, but no more than ten modifications, e.g., substitutions (e.g., conservative substitutions), insertions, or deletions, relative to the nucleotide sequences of any of SEQ ID NOs: 3660-3671. In some embodiments, the AAV capsid polypeptide, e.g., the AAV capsid variant (e.g., an AAV capsid variant described herein), comprises an amino acid sequence encoded by a nucleotide sequence comprising at least one, two, three, four, five, six, or seven, but no more than ten different nucleotides relative to the nucleotide sequence of any of SEQ ID NOs: 3660-3671.

[1125] In some embodiments, the nucleotide sequence encoding the AAV capsid polypeptide, e.g., the AAV capsid variant (e.g., an AAV capsid variant described herein), comprises the nucleotide sequence of any one of SEQ ID NOs: 3660-3671, or a nucleotide sequence substantially identical (e.g., having at least 70%, 75%, 80%, 85%, 90%, 92%, 95%, 97%, 98%, or 99% sequence identity) thereto. In some embodiments, nucleic acid sequence encoding the AAV capsid variant, e.g., an AAV capsid variant described herein, comprises a nucleotide sequence comprising at least one, two, three, four, five, six, or seven modifications, e.g., substitutions (e.g., conservative substitutions), insertions, or deletions, but no more than ten modifications, e.g., substitutions (e.g., conservative substitutions), insertions, or deletions, of the nucleotide sequences relative to any of SEQ ID NOs: 3660-3671. In some embodiments, the nucleotide sequence encoding the AAV capsid polypeptide, e.g., the AAV capsid variant (e.g., an AAV capsid variant described herein), comprises a nucleotide sequence comprising at least one, two, three, four, five, six, or seven, but no more than ten different nucleotides relative to the nucleotide sequence of any of SEQ ID NOs: 3660-3671.

[1126] In some embodiments, the nucleotide sequence encoding the AAV capsid polypeptide, e.g., the AAV capsid variant (e.g., an AAV capsid variant described herein), comprises the nucleotide sequence of SEQ ID NO: 3660, or a nucleotide sequence substantially identical (e.g., having at least 70%, 75%, 80%, 85%, 90%, 92%, 95%, 97%, 98%, or 99% sequence identity) thereto. In some embodiments, the nucleic acid sequence encoding the AAV capsid variant comprises a nucleotide sequence comprising at least one, two, three, four, five, six, or seven modifications, e.g., substitutions (e.g., conservative substitutions), insertions, or deletions, but no more than ten modifications, e.g., substitutions (e.g., conservative substitutions), insertions, or deletions, relative to the nucleotide sequences of SEQ ID NO: 3660. In some embodiments, the nucleotide sequence encoding the AAV capsid polypeptide, e.g., the AAV capsid variant (e.g., an AAV capsid variant described herein), comprises a nucleotide sequence comprising at least one, two, three, four, five, six, or seven, but no more than ten different nucleotides relative to the nucleotide sequence of SEQ ID NO: 3660.

[1127] In some embodiments, the nucleotide sequence encoding the AAV capsid polypeptide, e.g., the AAV capsid variant (e.g., an AAV capsid variant described herein), comprises the nucleotide sequence of SEQ ID NO: 3663, or a nucleotide sequence substantially identical (e.g., having at least 70%, 75%, 80%, 85%, 90%, 92%, 95%, 97%, 98%, or 99% sequence identity) thereto. In some embodiments, the nucleic acid sequence encoding the AAV capsid variant comprises a nucleotide sequence comprising at least one, two, three, four, five, six, or seven modifications, e.g., substitutions (e.g., conservative substitutions), insertions, or deletions, but no more than ten modifications, e.g., substitutions (e.g., conservative substitutions), insertions, or deletions, of the nucleotide sequences relative to SEQ ID NO: 3663. In some embodiments, the nucleotide sequence encoding the AAV capsid polypeptide, e.g., the AAV capsid variant (e.g., an AAV capsid variant described herein), comprises a nucleotide sequence comprising at least one, two, three, four, five, six, or seven, but no more than ten different nucleotides relative to the nucleotide sequence of SEQ ID NO: 3663.

[1128] In some embodiments, the AAV capsid polypeptide, e.g., the AAV capsid variant, comprises an amino acid residue other than “A” at position 587 and/or an amino acid residue other than “Q” at position 588, numbered according to SEQ ID NO: 138. In some embodiments, the AAV capsid polypeptide, e.g., the AAV capsid variant, comprises one, two, three, or all of an amino acid other than A at position 589, an amino acid other than Q at position 590, an amino acid other than A at position 591, and/or an amino acid other than Q at position 592, relative to a reference sequence numbered according to the amino acid sequence of SEQ ID NO: 138. In some embodiments, the AAV capsid polypeptide, e.g., the AAV capsid variant, comprises one, two, or all of an amino acid other than T at position 593, an amino acid other than G at position 594, and/or an amino acid other than W at position 595, relative to a reference sequence numbered according to the amino acid sequence of SEQ ID NO: 138. In some embodiments, the AAV capsid polypeptide, e.g., the AAV capsid variant, comprises one, two, or all of an amino acid other than V at position 596, an amino acid other than Q at position 597, and/or an amino acid other than N at position 598, relative to a reference sequence numbered according to the amino acid sequence of SEQ ID NO: 138.

[1129] In some embodiments, the AAV capsid polypeptide, e.g., the AAV capsid variant, comprises the amino acid sequence of PLNGAVHLY (SEQ ID NO: 3648) wherein the amino acid sequence of PLNGAVHLY (SEQ ID NO: 3648) is present immediately subsequent to position 586, relative to a reference sequence numbered according to the amino acid sequence of SEQ ID NO: 138.

[1130] In some embodiments, the polypeptide, e.g., the AAV capsid variant, comprises the amino acid sequence of GGTLAVVSL (SEQ ID NO: 3654), wherein the amino acid sequence of GGTLAVVSL (SEQ ID NO: 3654) is present immediately subsequent to position 586, relative to a reference sequence numbered according to the amino acid sequence of SEQ ID NO: 138.

[1131] In some embodiments, the AAV capsid polypeptide, e.g., the AAV capsid variant, comprises the amino acid sequence of IVMNSLK (SEQ ID NO: 3651), wherein the amino acid sequence of IVMNSLK (SEQ ID NO: 3651) is present immediately subsequent to position 588, relative to a reference sequence numbered according to the amino acid sequence of SEQ ID NO: 138.

[1132] In some embodiments, the AAV capsid polypeptide, e.g., the AAV capsid variant, comprises the amino acid sequence of any of SEQ ID NOs: 3649, 3650, 3652, 3653, or 3655-3659, wherein the amino acid sequence of any of the aforesaid sequences is present immediately subsequent to position 589, relative to a reference sequence numbered according to the amino acid sequence of SEQ ID NO: 138.

[1133] In some embodiments, the AAV capsid polypeptide, e.g., the AAV capsid variant, further comprises a substitution at position K449, e.g., a K449R substitution, numbered according to SEQ ID NO: 138. In some embodiments, the AAV capsid variant further comprises a modification, e.g., an insertion, substitution, and/or deletion in loop I, II, IV, and/or VI.

[1134] In some embodiments, the AAV capsid polypeptide, e.g., the AAV capsid variant, further comprises an amino acid sequence comprising at least one, two or three modifications, e.g., substitutions (e.g., conservative substitutions), insertions or deletions, but not more than 30, 20 or 10 modifications relative to the amino acid sequence of SEQ ID NO: 138. In some embodiments, the AAV capsid polypeptide, e.g., the AAV capsid variant, further comprises an amino acid sequence having at least one, two or three but no more than 30, 20, or 10 different amino acids relative to the amino acid sequence of SEQ ID NO: 138. In some embodiments, the AAV capsid variant further comprises the amino acid sequence of SEQ ID NO: 138, or an amino acid sequence with at least 80% (e.g., at least about 85, 90, 95, 96, 97, 98, or 99%) sequence identity thereto. In some embodiments, the AAV capsid variant further comprises an amino acid sequence encoded by the nucleotide sequence of SEQ ID NO: 137, or a sequence with at least 80% (e.g., at least about 85, 90, 95, 96, 97, 98, or 99%) sequence identity thereto.

[1135] In some embodiments, an AAV capsid polypeptide, e.g., the AAV capsid variant, comprises immediately subsequent to position 586, 588, or 589, numbered relative to SEQ ID NO: 138 or corresponding to equivalent positions in any other AAV serotype (e.g., AAV1, AAV2, AAV3, AAV3b, AAV4, AAV5, AAV6, AAV7, AAV8, AAVrh8, AAVrh10, AAVrh32.33, AAVrh74, SEQ ID NO: 1, SEQ ID NO: 11, PHP.N, PHP.B, or an AAV serotype as provided in Table 6 of WO 2021/230987 (the contents of which are hereby incorporated by reference in their entirety), at least 3, 4, 5, 6, 7, 8, 9, 10, 11, 12, 13, 14, 15, 16, 17, 18, or 19 consecutive amino acids of any of amino acid sequence provided in Tables 3, 20, 24 or 25. In some embodiments, the at least 3, 4, 5, 6, 7, 8, 9, 10, 11, 12, 13, 14, 15, 16, 17, 18, or 19 consecutive amino acids of any of amino acid sequence provided in Tables 3, 20, 24 or 25 replaces at least one, two, three, four, five, six, seven, eight, nine, ten, elven, or all of positions A587, Q588, A589, Q590, A591, Q592, T593, G594, W595, V596, Q597, and/or N598, numbered according to SEQ ID NO: 138 or corresponding to equivalent positions in any other AAV serotype (e.g., AAV1, AAV2, AAV3, AAV3b, AAV4, AAV5, AAV6, AAV7, AAV8, AAVrh8, AAVrh10, AAVrh32.33, AAVrh74, SEQ ID NO: 1, SEQ ID NO: 11, PHP.N, PHP.B, or an AAV serotype as provided in Table 6 of WO 2021/230987 (the contents of which are hereby incorporated by reference in their entirety). In some embodiments, the at least 3, 4, 5, 6, 7, 8, 9, 10, 11, 12, 13, 14, 15, 16, 17, 18, or 19 consecutive amino acids of any of amino acid sequence provided in Tables 3, 20, 24 or 25 replaces positions A587, Q588, or both positions A587 and Q588, numbered according to SEQ ID NO: 138 or corresponding to equivalent positions in any other AAV serotype (e.g., AAV1, AAV2, AAV3, AAV3b, AAV4, AAV5, AAV6, AAV7, AAV8, AAVrh8, AAVrh10, AAVrh32.33, AAVrh74, SEQ ID NO: 1, SEQ ID NO: 11, PHP.N, PHP.B, or an AAV serotype as provided in Table 6 of WO 2021/230987 (the contents of which are hereby incorporated by reference in their entirety). In some embodiments, the AAV capsid variant comprises an amino acid other than the wild-type, e.g., native, amino acid, at one, two, three, four, five, six, seven, eight, nine, ten, eleven or all of positions A587, Q588, A589, Q590, A591, Q592, T593, G594, W595, V596, Q597, and/or N598, numbered according to SEQ ID NO: 138 or corresponding to equivalent positions in any other AAV serotype (e.g., AAV1, AAV2, AAV3, AAV3b, AAV4, AAV5, AAV6, AAV7, AAV8, AAVrh8, AAVrh10, AAVrh32.33, AAVrh74, SEQ ID NO: 1, SEQ ID NO: 11, PHP.N, PHP.B, or an AAV serotype as provided in Table 6 of WO 2021/230987 (the contents of which are hereby incorporated by reference in their entirety). In some embodiments, the AAV capsid variant comprises an amino acid other than the wild-type, e.g., native, amino acid, at position A587, Q588, or both positions A587 and Q588, numbered according to SEQ ID NO: 138 or corresponding to equivalent positions in any other AAV serotype (e.g., AAV1, AAV2, AAV3, AAV3b, AAV4, AAV5, AAV6, AAV7, AAV8, AAVrh8, AAVrh10, AAVrh32.33, AAVrh74, SEQ ID NO: 1, SEQ ID NO: 11, PHP.N, PHP.B, or an AAV serotype as provided in Table 6 of WO 2021/230987 (the contents of which are hereby incorporated by reference in their entirety). In some embodiments, the AAV capsid variant comprises a modification, e.g., substitution, at one, two, three, four, five, six, seven, eight, nine, ten eleven or all of positions A587, Q588, A589, Q590, A591, Q592, T593, G594, W595, V596, Q597, and/or N598, numbered according to SEQ ID NO: 138 or corresponding to equivalent positions in any other AAV serotype (e.g., AAV1, AAV2, AAV3, AAV3b, AAV4, AAV5, AAV6, AAV7, AAV8, AAVrh8, AAVrh10, AAVrh32.33, AAVrh74, SEQ ID NO: 1, SEQ ID NO: 11, PHP.N, PHP.B, or an AAV serotype as provided in Table 6 of WO 2021/230987 (the contents of which are hereby incorporated by reference in their entirety). In some embodiments, the AAV capsid variant comprises a modification, e.g., substitution, at position A587, Q588, or both positions A587 and Q588, numbered according to SEQ ID NO: 138 or corresponding to equivalent positions in any other AAV serotype (e.g., AAV1, AAV2, AAV3, AAV3b, AAV4, AAV5, AAV6, AAV7, AAV8, AAVrh8, AAVrh10, AAVrh32.33, AAVrh74, SEQ ID NO: 1, SEQ ID NO: 11, PHP.N, PHP.B, or an AAV serotype as provided in Table 6 of WO 2021/230987 (the contents of which are hereby incorporated by reference in their entirety).

[1136] In some embodiments, an AAV capsid polypeptide, e.g., an AAV capsid variant, of the present disclosure comprises an amino acid sequence as described herein, e.g. an amino acid sequence of an AAV capsid variant chosen from TTD-001, TTD-002, TTD-003, TTD-004, TTD-005, TTD-006, TTD-007, TTD-008, TTD-009, TTD-010, TTD-011, or TTD-012, e.g., as described in Tables 4, 5, and 23.

[1137] In some embodiments, an AAV capsid polypeptide, e.g. the AAV capsid variant, comprises a VP1, VP2, and/or VP3 protein comprising an amino acid sequence described herein, e.g. an amino acid sequence of an AAV capsid variant chosen from TTD-001, TTD-002, TTD-003, TTD-004, TTD-005, TTD-006, TTD-007, TTD-008, TTD-009, TTD-010, TTD-011, or TTD-012, e.g., as described in Tables 4, 5 and 23.

[1138] In some embodiments, an AAV capsid polypeptide, e.g., the AAV capsid variant, comprises an amino acid sequence encoded by a nucleotide sequence as described herein, e.g. a nucleotide sequence of an AAV capsid variant chosen from TTD-001, TTD-002, TTD-003, TTD-004, TTD-005, TTD-006, TTD-007, TTD-008, TTD-009, TTD-010, TTD-011, or TTD-012, e.g., as described in Tables 4 and 6.

[1139] In some embodiments, a polynucleotide encoding an AAV capsid polypeptide, e.g., an AAV capsid variant, of the present disclosure comprises a nucleotide sequence described herein, e.g. a nucleotide sequence of an AAV capsid variant chosen from TTD-001, TTD-002, TTD-003, TTD-004, TTD-005, TTD-006, TTD-007, TTD-008, TTD-009, TTD-010, TTD-011, or TTD-012, e.g., as described in Tables 4 and 6.

[1140] In some embodiments, insertion of a nucleic acid sequence, targeting nucleic acid sequence, or a peptide into a parent AAV sequence generates the non-limiting exemplary full length capsid sequences, e.g., an AAV capsid polypeptide, e.g., an AAV capsid variant, as described in Tables 4, 5, 6, and 23.

TABLE 4
Exemplary full length capsid sequences (VP1 with insert)

| | VP1 DNA | VP1 PRT | Peptide PRT | Peptide DNA |
|---|---|---|---|---|
| Serotype | SEQ ID NO: | SEQ ID NO: | SEQ ID NO: | SEQ ID NO: |
| TTD-001 | 3623 | 3636 | 3648 | 3660 |
| TTD-002 | 3624 or 3625 | 3637 | 3649 | 3661 |
| TTD-003 | 3626 | 3638 | 3650 | 3662 |
| TTD-004 | 3627 | 3639 | 3651 | 3663 |
| TTD-005 | 3628 | 3640 | 3652 | 3664 |
| TTD-006 | 3629 | 3641 | 3653 | 3665 |
| TTD-007 | 3630 | 3642 | 3654 | 3666 |
| TTD-008 | 3631 | 3643 | 3655 | 3667 |
| TTD-009 | 3632 | 3644 | 3656 | 3668 |
| TTD-010 | 3633 | 3645 | 3657 | 3669 |
| TTD-011 | 3634 | 3646 | 3658 | 3670 |
| TTD-012 | 3635 | 3647 | 3659 | 3671 |
| TTD-013 | 4 | 5 | 314 | 6 |
| TTD-014 | 7 | 8 | 566 | 9 |

TABLE 5
Exemplary full length capsid amino acid sequences

| | SEQ | |
|---|---|---|
| Name and | ID | |
| Annotation | NO: | Amino Acid Sequence |
| TTD-001 | 3636 | MAADGYLPDWLEDNLSEGIREWWALKPGAPQPKANQQHQDNARGLVLPG |
| 9mer peptide | | YKYLGPGNGLDKGEPVNAADAAALEHDKAYDQQLKAGDNPYLKYNHADA |
| underlined, | | EFQERLKEDTSFGGNLGRAVFQAKKRLLEPLGLVEEAAKTAPGKKRPVE |
| starts at | | QSPQEPDSSAGIGKSGAQPAKKRLNFGQTGDTESVPDPQPIGEPPAAPS |
| position 587 | | GVGSLTMASGGGAPVADNNEGADGVGSSSGNWHCDSQWLGDRVITTSTR |
| (immediately | | TWALPTYNNHLYKQISNSTSGGSSNDNAYFGYSTPWGYFDFNRFHCHFS |
| subsequent to | | PRDWQRLINNNWGFRPKRLNFKLFNIQVKEVTDNNGVKTIANNLTSTVQ |
| position 586); | | VFTDSDYQLPYVLGSAHEGCLPPFPADVFMIPQYGYLTLNDGSQAVGRS |
| 743 aa | | SFYCLEYFPSQMLRTGNNFQFSYEFENVPFHSSYAHSQSLDRLMNPLID |
| | | QYLYYLSKTINGSGQNQQTLKFSVAGPSNMAVQGRNYIPGPSYRQQRVS |
| | | TTVTQNNNSEFAWPGASSWALNGRNSLMNPGPAMASHKEGEDRFFPLSG |
| | | SLIFGKQGTGRDNVDADKVMITNEEEIKTTNPVATESYGQVATNHQSPL |
| | | NGAVHLYAQAQTGWVQNQGILPGMVWQDRDVYLQGPIWAKIPHTDGNFH |
| | | PSPLMGGFGMKHPPPQILIKNTPVPADPPTAFNKDKLNSFITQYSTGQV |
| | | SVEIEWELQKENSKRWNPEIQYTSNYYKSNNVEFAVNTEGVYSEPRPIG |
| | | TRYLTRNL |
| TTD-002 | 3637 | MAADGYLPDWLEDNLSEGIREWWALKPGAPQPKANQQHQDNARGLVLPG |
| 7mer peptide | | YKYLGPGNGLDKGEPVNAADAAALEHDKAYDQQLKAGDNPYLKYNHADA |
| underlined, | | EFQERLKEDTSFGGNLGRAVFQAKKRLLEPLGLVEEAAKTAPGKKRPVE |
| starts at | | QSPQEPDSSAGIGKSGAQPAKKRLNFGQTGDTESVPDPQPIGEPPAAPS |
| position 590 | | GVGSLTMASGGGAPVADNNEGADGVGSSSGNWHCDSQWLGDRVITTSTR |
| (immediately | | TWALPTYNNHLYKQISNSTSGGSSNDNAYFGYSTPWGYFDFNRFHCHFS |
| subsequent to | | PRDWQRLINNNWGFRPKRLNFKLFNIQVKEVTDNNGVKTIANNLTSTVQ |
| position 589); | | VFTDSDYQLPYVLGSAHEGCLPPFPADVFMIPQYGYLTLNDGSQAVGRS |
| 743 aa | | SFYCLEYFPSQMLRTGNNFQFSYEFENVPFHSSYAHSQSLDRLMNPLID |
| | | QYLYYLSKTINGSGQNQQTLKFSVAGPSNMAVQGRNYIPGPSYRQQRVS |
| | | TTVTQNNNSEFAWPGASSWALNGRNSLMNPGPAMASHKEGEDRFFPLSG |
| | | SLIFGKQGTGRDNVDADKVMITNEEEIKTTNPVATESYGQVATNHQSAQ |
| | | ARDSPKGWQAQTGWVQNQGILPGMVWQDRDVYLQGPIWAKIPHTDGNFH |
| | | PSPLMGGFGMKHPPPQILIKNTPVPADPPTAFNKDKLNSFITQYSTGQV |
| | | SVEIEWELQKENSKRWNPEIQYTSNYYKSNNVEFAVNTEGVYSEPRPIG |
| | | TRYLTRNL |
| TTD-003 | 3638 | MAADGYLPDWLEDNLSEGIREWWALKPGAPQPKANQQHQDNARGLVLPG |
| 7mer peptide | | YKYLGPGNGLDKGEPVNAADAAALEHDKAYDQQLKAGDNPYLKYNHADA |
| underlined, | | EFQERLKEDTSFGGNLGRAVFQAKKRLLEPLGLVEEAAKTAPGKKRPVE |
| starts at | | QSPQEPDSSAGIGKSGAQPAKKRLNFGQTGDTESVPDPQPIGEPPAAPS |
| position 590 | | GVGSLTMASGGGAPVADNNEGADGVGSSSGNWHCDSQWLGDRVITTSTR |
| (immediately | | TWALPTYNNHLYKQISNSTSGGSSNDNAYFGYSTPWGYFDFNRFHCHFS |
| subsequent to | | PRDWQRLINNNWGFRPKRLNFKLFNIQVKEVTDNNGVKTIANNLTSTVQ |
| position 589); | | VFTDSDYQLPYVLGSAHEGCLPPFPADVFMIPQYGYLTLNDGSQAVGRS |
| 743 aa | | SFYCLEYFPSQMLRTGNNFQFSYEFENVPFHSSYAHSQSLDRLMNPLID |
| | | QYLYYLSKTINGSGQNQQTLKFSVAGPSNMAVQGRNYIPGPSYRQQRVS |
| | | TTVTQNNNSEFAWPGASSWALNGRNSLMNPGPAMASHKEGEDRFFPLSG |
| | | SLIFGKQGTGRDNVDADKVMITNEEEIKTTNPVATESYGQVATNHQSAQ |
| | | AYSTDVRMQAQTGWVQNQGILPGMVWQDRDVYLQGPIWAKIPHTDGNFH |
| | | PSPLMGGFGMKHPPPQILIKNTPVPADPPTAFNKDKLNSFITQYSTGQV |
| | | SVEIEWELQKENSKRWNPEIQYTSNYYKSNNVEFAVNTEGVYSEPRPIG |
| | | TRYLTRNL |
| TTD-004 | 3639 | MAADGYLPDWLEDNLSEGIREWWALKPGAPQPKANQQHQDNARGLVLPG |
| 7mer peptide | | YKYLGPGNGLDKGEPVNAADAAALEHDKAYDQQLKAGDNPYLKYNHADA |
| underlined, | | EFQERLKEDTSFGGNLGRAVFQAKKRLLEPLGLVEEAAKTAPGKKRPVE |
| starts at | | QSPQEPDSSAGIGKSGAQPAKKRLNFGQTGDTESVPDPQPIGEPPAAPS |
| position 589 | | GVGSLTMASGGGAPVADNNEGADGVGSSSGNWHCDSQWLGDRVITTSTR |
| (immediately | | TWALPTYNNHLYKQISNSTSGGSSNDNAYFGYSTPWGYFDFNRFHCHFS |
| subsequent to | | PRDWQRLINNNWGFRPKRLNFKLFNIQVKEVTDNNGVKTIANNLTSTVQ |
| position 588); | | VFTDSDYQLPYVLGSAHEGCLPPFPADVFMIPQYGYLTLNDGSQAVGRS |
| 743 aa | | SFYCLEYFPSQMLRTGNNFQFSYEFENVPFHSSYAHSQSLDRLMNPLID |
| | | QYLYYLSKTINGSGQNQQTLKFSVAGPSNMAVQGRNYIPGPSYRQQRVS |
| | | TTVTQNNNSEFAWPGASSWALNGRNSLMNPGPAMASHKEGEDRFFPLSG |
| | | SLIFGKQGTGRDNVDADKVMITNEEEIKTTNPVATESYGQVATNHQSAQ |
| | | IVMNSLKAQAQTGWVQNQGILPGMVWQDRDVYLQGPIWAKIPHTDGNFH |
| | | PSPLMGGFGMKHPPPQILIKNTPVPADPPTAFNKDKLNSFITQYSTGQV |
| | | SVEIEWELQKENSKRWNPEIQYTSNYYKSNNVEFAVNTEGVYSEPRPIG |
| | | TRYLTRNL |
| TTD-005 | 3640 | MAADGYLPDWLEDNLSEGIREWWALKPGAPQPKANQQHQDNARGLVLPG |
| 7mer peptide | | YKYLGPGNGLDKGEPVNAADAAALEHDKAYDQQLKAGDNPYLKYNHADA |
| underlined, | | EFQERLKEDTSFGGNLGRAVFQAKKRLLEPLGLVEEAAKTAPGKKRPVE |
| starts at | | QSPQEPDSSAGIGKSGAQPAKKRLNFGQTGDTESVPDPQPIGEPPAAPS |
| position 590 | | GVGSLTMASGGGAPVADNNEGADGVGSSSGNWHCDSQWLGDRVITTSTR |
| (immediately | | TWALPTYNNHLYKQISNSTSGGSSNDNAYFGYSTPWGYFDFNRFHCHFS |
| subsequent to | | PRDWQRLINNNWGFRPKRLNFKLFNIQVKEVTDNNGVKTIANNLTSTVQ |
| position 589); | | VFTDSDYQLPYVLGSAHEGCLPPFPADVFMIPQYGYLTLNDGSQAVGRS |
| 743 aa | | SFYCLEYFPSQMLRTGNNFQFSYEFENVPFHSSYAHSQSLDRLMNPLID |
| | | QYLYYLSKTINGSGQNQQTLKFSVAGPSNMAVQGRNYIPGPSYRQQRVS |
| | | TTVTQNNNSEFAWPGASSWALNGRNSLMNPGPAMASHKEGEDRFFPLSG |
| | | SLIFGKQGTGRDNVDADKVMITNEEEIKTTNPVATESYGQVATNHQSAQ |
| | | ARESPRGLQAQTGWVQNQGILPGMVWQDRDVYLQGPIWAKIPHTDGNFH |
| | | PSPLMGGFGMKHPPPQILIKNTPVPADPPTAFNKDKLNSFITQYSTGQV |
| | | SVEIEWELQKENSKRWNPEIQYTSNYYKSNNVEFAVNTEGVYSEPRPIG |
| | | TRYLTRNL |
| TTD-006 | 3641 | MAADGYLPDWLEDNLSEGIREWWALKPGAPQPKANQQHQDNARGLVLPG |
| 7mer peptide | | YKYLGPGNGLDKGEPVNAADAAALEHDKAYDQQLKAGDNPYLKYNHADA |
| underlined, | | EFQERLKEDTSFGGNLGRAVFQAKKRLLEPLGLVEEAAKTAPGKKRPVE |
| starts at | | QSPQEPDSSAGIGKSGAQPAKKRLNFGQTGDTESVPDPQPIGEPPAAPS |
| position 590 | | GVGSLTMASGGGAPVADNNEGADGVGSSSGNWHCDSQWLGDRVITTSTR |
| (immediately | | TWALPTYNNHLYKQISNSTSGGSSNDNAYFGYSTPWGYFDFNRFHCHFS |
| subsequent | | PRDWQRLINNNWGFRPKRLNFKLFNIQVKEVTDNNGVKTIANNLTSTVQ |
| to 589); | | VFTDSDYQLPYVLGSAHEGCLPPFPADVFMIPQYGYLTLNDGSQAVGRS |
| 743 aa | | SFYCLEYFPSQMLRTGNNFQFSYEFENVPFHSSYAHSQSLDRLMNPLID |
| | | QYLYYLSKTINGSGQNQQTLKFSVAGPSNMAVQGRNYIPGPSYRQQRVS |
| | | TTVTQNNNSEFAWPGASSWALNGRNSLMNPGPAMASHKEGEDRFFPLSG |
| | | SLIFGKQGTGRDNVDADKVMITNEEEIKTTNPVATESYGQVATNHQSAQ |
| | | ASFNDTRAQAQTGWVQNQGILPGMVWQDRDVYLQGPIWAKIPHTDGNFH |
| | | PSPLMGGFGMKHPPPQILIKNTPVPADPPTAFNKDKLNSFITQYSTGQV |
| | | SVEIEWELQKENSKRWNPEIQYTSNYYKSNNVEFAVNTEGVYSEPRPIG |
| | | TRYLTRNL |
| TTD-007 | 3642 | MAADGYLPDWLEDNLSEGIREWWALKPGAPQPKANQQHQDNARGLVLPG |
| 9mer peptide | | YKYLGPGNGLDKGEPVNAADAAALEHDKAYDQQLKAGDNPYLKYNHADA |
| underlined, | | EFQERLKEDTSFGGNLGRAVFQAKKRLLEPLGLVEEAAKTAPGKKRPVE |
| starts at | | QSPQEPDSSAGIGKSGAQPAKKRLNFGQTGDTESVPDPQPIGEPPAAPS |
| position 587 | | GVGSLTMASGGGAPVADNNEGADGVGSSSGNWHCDSQWLGDRVITTSTR |
| (immediately | | TWALPTYNNHLYKQISNSTSGGSSNDNAYFGYSTPWGYFDFNRFHCHFS |
| subsequent to | | PRDWQRLINNNWGFRPKRLNFKLFNIQVKEVTDNNGVKTIANNLTSTVQ |
| position 586); | | VFTDSDYQLPYVLGSAHEGCLPPFPADVFMIPQYGYLTLNDGSQAVGRS |
| 743 aa | | SFYCLEYFPSQMLRTGNNFQFSYEFENVPFHSSYAHSQSLDRLMNPLID |
| | | QYLYYLSKTINGSGQNQQTLKFSVAGPSNMAVQGRNYIPGPSYRQQRVS |
| | | TTVTQNNNSEFAWPGASSWALNGRNSLMNPGPAMASHKEGEDRFFPLSG |
| | | SLIFGKQGTGRDNVDADKVMITNEEEIKTTNPVATESYGQVATNHQSGG |
| | | TLAVVSLAQAQTGWVQNQGILPGMVWQDRDVYLQGPIWAKIPHTDGNFH |
| | | PSPLMGGFGMKHPPPQILIKNTPVPADPPTAFNKDKLNSFITQYSTGQV |
| | | SVEIEWELQKENSKRWNPEIQYTSNYYKSNNVEFAVNTEGVYSEPRPIG |
| | | TRYLTRNL |
| TTD-008 | 3643 | MAADGYLPDWLEDNLSEGIREWWALKPGAPQPKANQQHQDNARGLVLPG |
| 7mer peptide | | YKYLGPGNGLDKGEPVNAADAAALEHDKAYDQQLKAGDNPYLKYNHADA |
| underlined, | | EFQERLKEDTSFGGNLGRAVFQAKKRLLEPLGLVEEAAKTAPGKKRPVE |
| starts at | | QSPQEPDSSAGIGKSGAQPAKKRLNFGQTGDTESVPDPQPIGEPPAAPS |
| position 590 | | GVGSLTMASGGGAPVADNNEGADGVGSSSGNWHCDSQWLGDRVITTSTR |
| (immediately | | TWALPTYNNHLYKQISNSTSGGSSNDNAYFGYSTPWGYFDFNRFHCHFS |
| subsequent | | PRDWQRLINNNWGFRPKRLNFKLFNIQVKEVTDNNGVKTIANNLTSTVQ |
| to 589); | | VFTDSDYQLPYVLGSAHEGCLPPFPADVFMIPQYGYLTLNDGSQAVGRS |
| 743 aa | | SFYCLEYFPSQMLRTGNNFQFSYEFENVPFHSSYAHSQSLDRLMNPLID |
| | | QYLYYLSKTINGSGQNQQTLKFSVAGPSNMAVQGRNYIPGPSYRQQRVS |
| | | TTVTQNNNSEFAWPGASSWALNGRNSLMNPGPAMASHKEGEDRFFPLSG |
| | | SLIFGKQGTGRDNVDADKVMITNEEEIKTTNPVATESYGQVATNHQSAQ |
| | | AYGLPKGPQAQTGWVQNQGILPGMVWQDRDVYLQGPIWAKIPHTDGNFH |
| | | PSPLMGGFGMKHPPPQILIKNTPVPADPPTAFNKDKLNSFITQYSTGQV |
| | | SVEIEWELQKENSKRWNPEIQYTSNYYKSNNVEFAVNTEGVYSEPRPIG |
| | | TRYLTRNL |
| TTD-009 | 3644 | MAADGYLPDWLEDNLSEGIREWWALKPGAPQPKANQQHQDNARGLVLPG |
| 7mer peptide | | YKYLGPGNGLDKGEPVNAADAAALEHDKAYDQQLKAGDNPYLKYNHADA |
| underlined, | | EFQERLKEDTSFGGNLGRAVFQAKKRLLEPLGLVEEAAKTAPGKKRPVE |
| starts at | | QSPQEPDSSAGIGKSGAQPAKKRLNFGQTGDTESVPDPQPIGEPPAAPS |
| position 590 | | GVGSLTMASGGGAPVADNNEGADGVGSSSGNWHCDSQWLGDRVITTSTR |
| (immediately | | TWALPTYNNHLYKQISNSTSGGSSNDNAYFGYSTPWGYFDFNRFHCHFS |
| subsequent | | PRDWQRLINNNWGFRPKRLNFKLFNIQVKEVTDNNGVKTIANNLTSTVQ |
| to 589); | | VFTDSDYQLPYVLGSAHEGCLPPFPADVFMIPQYGYLTLNDGSQAVGRS |
| 743 aa | | SFYCLEYFPSQMLRTGNNFQFSYEFENVPFHSSYAHSQSLDRLMNPLID |
| | | QYLYYLSKTINGSGQNQQTLKFSVAGPSNMAVQGRNYIPGPSYRQQRVS |
| | | TTVTQNNNSEFAWPGASSWALNGRNSLMNPGPAMASHKEGEDRFFPLSG |
| | | SLIFGKQGTGRDNVDADKVMITNEEEIKTTNPVATESYGQVATNHQSAQ |
| | | ASTGTLRLQAQTGWVQNQGILPGMVWQDRDVYLQGPIWAKIPHTDGNFH |
| | | PSPLMGGFGMKHPPPQILIKNTPVPADPPTAFNKDKLNSFITQYSTGQV |
| | | SVEIEWELQKENSKRWNPEIQYTSNYYKSNNVEFAVNTEGVYSEPRPIG |
| | | TRYLTRNL |
| TTD-010 | 3645 | MAADGYLPDWLEDNLSEGIREWWALKPGAPQPKANQQHQDNARGLVLPG |
| 7mer peptide | | YKYLGPGNGLDKGEPVNAADAAALEHDKAYDQQLKAGDNPYLKYNHADA |
| underlined, | | EFQERLKEDTSFGGNLGRAVFQAKKRLLEPLGLVEEAAKTAPGKKRPVE |
| starts at | | QSPQEPDSSAGIGKSGAQPAKKRLNFGQTGDTESVPDPQPIGEPPAAPS |
| position 590 | | GVGSLTMASGGGAPVADNNEGADGVGSSSGNWHCDSQWLGDRVITTSTR |
| (immediately | | TWALPTYNNHLYKQISNSTSGGSSNDNAYFGYSTPWGYFDFNRFHCHFS |
| subsequent | | PRDWQRLINNNWGFRPKRLNFKLFNIQVKEVTDNNGVKTIANNLTSTVQ |
| to 589); | | VFTDSDYQLPYVLGSAHEGCLPPFPADVFMIPQYGYLTLNDGSQAVGRS |
| 743 aa | | SFYCLEYFPSQMLRTGNNFQFSYEFENVPFHSSYAHSQSLDRLMNPLID |
| | | QYLYYLSKTINGSGQNQQTLKFSVAGPSNMAVQGRNYIPGPSYRQQRVS |
| | | TTVTQNNNSEFAWPGASSWALNGRNSLMNPGPAMASHKEGEDRFFPLSG |
| | | SLIFGKQGTGRDNVDADKVMITNEEEIKTTNPVATESYGQVATNHQSAQ |
| | | AYSTDERMQAQTGWVQNQGILPGMVWQDRDVYLQGPIWAKIPHTDGNFH |
| | | PSPLMGGFGMKHPPPQILIKNTPVPADPPTAFNKDKLNSFITQYSTGQV |
| | | SVEIEWELQKENSKRWNPEIQYTSNYYKSNNVEFAVNTEGVYSEPRPIG |
| | | TRYLTRNL |
| TTD-011 | 3646 | MAADGYLPDWLEDNLSEGIREWWALKPGAPQPKANQQHQDNARGLVLPG |
| 7mer peptide | | YKYLGPGNGLDKGEPVNAADAAALEHDKAYDQQLKAGDNPYLKYNHADA |
| underlined, | | EFQERLKEDTSFGGNLGRAVFQAKKRLLEPLGLVEEAAKTAPGKKRPVE |
| starts at | | QSPQEPDSSAGIGKSGAQPAKKRLNFGQTGDTESVPDPQPIGEPPAAPS |
| position 590 | | GVGSLTMASGGGAPVADNNEGADGVGSSSGNWHCDSQWLGDRVITTSTR |
| (immediately | | TWALPTYNNHLYKQISNSTSGGSSNDNAYFGYSTPWGYFDFNRFHCHFS |
| subsequent | | PRDWQRLINNNWGFRPKRLNFKLFNIQVKEVTDNNGVKTIANNLTSTVQ |
| to 589); | | VFTDSDYQLPYVLGSAHEGCLPPFPADVFMIPQYGYLTLNDGSQAVGRS |
| 743 aa | | SFYCLEYFPSQMLRTGNNFQFSYEFENVPFHSSYAHSQSLDRLMNPLID |
| | | QYLYYLSKTINGSGQNQQTLKFSVAGPSNMAVQGRNYIPGPSYRQQRVS |
| | | TTVTQNNNSEFAWPGASSWALNGRNSLMNPGPAMASHKEGEDRFFPLSG |
| | | SLIFGKQGTGRDNVDADKVMITNEEEIKTTNPVATESYGQVATNHQSAQ |
| | | AYSTDERKQAQTGWVQNQGILPGMVWQDRDVYLQGPIWAKIPHTDGNFH |
| | | PSPLMGGFGMKHPPPQILIKNTPVPADPPTAFNKDKLNSFITQYSTGQV |
| | | SVEIEWELQKENSKRWNPEIQYTSNYYKSNNVEFAVNTEGVYSEPRPIG |
| | | TRYLTRNL |
| TTD-012 | 3647 | MAADGYLPDWLEDNLSEGIREWWALKPGAPQPKANQQHQDNARGLVLPG |
| 7mer peptide | | YKYLGPGNGLDKGEPVNAADAAALEHDKAYDQQLKAGDNPYLKYNHADA |
| underlined, | | EFQERLKEDTSFGGNLGRAVFQAKKRLLEPLGLVEEAAKTAPGKKRPVE |
| starts at | | QSPQEPDSSAGIGKSGAQPAKKRLNFGQTGDTESVPDPQPIGEPPAAPS |
| position 590 | | GVGSLTMASGGGAPVADNNEGADGVGSSSGNWHCDSQWLGDRVITTSTR |
| (immediately | | TWALPTYNNHLYKQISNSTSGGSSNDNAYFGYSTPWGYFDFNRFHCHFS |
| subsequent | | PRDWQRLINNNWGFRPKRLNFKLFNIQVKEVTDNNGVKTIANNLTSTVQ |
| to 589); | | VFTDSDYQLPYVLGSAHEGCLPPFPADVFMIPQYGYLTLNDGSQAVGRS |
| 743 aa | | SFYCLEYFPSQMLRTGNNFQFSYEFENVPFHSSYAHSQSLDRLMNPLID |
| | | QYLYYLSKTINGSGQNQQTLKFSVAGPSNMAVQGRNYIPGPSYRQQRVS |
| | | TTVTQNNNSEFAWPGASSWALNGRNSLMNPGPAMASHKEGEDRFFPLSG |
| | | SLIFGKQGTGRDNVDADKVMITNEEEIKTTNPVATESYGQVATNHQSAQ |
| | | AYVSSVKMQAQTGWVQNQGILPGMVWQDRDVYLQGPIWAKIPHTDGNFH |
| | | PSPLMGGFGMKHPPPQILIKNTPVPADPPTAFNKDKLNSFITQYSTGQV |
| | | SVEIEWELQKENSKRWNPEIQYTSNYYKSNNVEFAVNTEGVYSEPRPIG |
| | | TRYLTRNL |
| TTD-013 | 5 | MAADGYLPDWLEDNLSEGIREWWALKPGAPQPKANQQHQDNARGLVLPG |
| 9mer peptide | | YKYLGPGNGLDKGEPVNAADAAALEHDKAYDQQLKAGDNPYLKYNHADA |
| underlined, | | EFQERLKEDTSFGGNLGRAVFQAKKRLLEPLGLVEEAAKTAPGKKRPVE |
| starts at | | QSPQEPDSSAGIGKSGAQPAKKRLNFGQTGDTESVPDPQPIGEPPAAPS |
| position 587 | | GVGSLTMASGGGAPVADNNEGADGVGSSSGNWHCDSQWLGDRVITTSTR |
| (immediately | | TWALPTYNNHLYKQISNSTSGGSSNDNAYFGYSTPWGYFDFNRFHCHFS |
| subsequent to | | PRDWQRLINNNWGFRPKRLNFKLFNIQVKEVTDNNGVKTIANNLTSTVQ |
| position 586); | | VFTDSDYQLPYVLGSAHEGCLPPFPADVFMIPQYGYLTLNDGSQAVGRS |
| modification at | | SFYCLEYFPSQMLRTGNNFQFSYEFENVPFHSSYAHSQSLDRLMNPLID |
| position 604; | | QYLYYLSKTINGSGQNQQTLKFSVAGPSNMAVQGRNYIPGPSYRQQRVS |
| 743 aa | | TTVTQNNNSEFAWPGASSWALNGRNSLMNPGPAMASHKEGEDRFFPLSG |
| | | SLIFGKQGTGRDNVDADKVMITNEEEIKTTNPVATESYGQVATNHQSPL |
| | | NGAVHLYAQAQTGWVPNQGILPGMVWQDRDVYLQGPIWAKIPHTDGNFH |
| | | PSPLMGGFGMKHPPPQILIKNTPVPADPPTAFNKDKLNSFITQYSTGQV |
| | | SVEIEWELQKENSKRWNPEIQYTSNYYKSNNVEFAVNTEGVYSEPRPIG |
| | | TRYLTRNL |
| TTD-014 | 8 | MAADGYLPDWLEDNLSEGIREWWALKPGAPQPKANQQHQDNARGLVLPG |
| 9mer peptide | | YKYLGPGNGLDKGEPVNAADAAALEHDKAYDQQLKAGDNPYLKYNHADA |
| underlined, | | EFQERLKEDTSFGGNLGRAVFQAKKRLLEPLGLVEEAAKTAPGKKRPVE |
| starts at | | QSPQEPDSSAGIGKSGAQPAKKRLNFGQTGDTESVPDPQPIGEPPAAPS |
| position 587 | | GVGSLTMASGGGAPVADNNEGADGVGSSSGNWHCDSQWLGDRVITTSTR |
| (immediately | | TWALPTYNNHLYKQISNSTSGGSSNDNAYFGYSTPWGYFDFNRFHCHFS |
| subsequent to | | PRDWQRLINNNWGFRPKRLNFKLFNIQVKEVTDNNGVKTIANNLTSTVQ |
| position 586); | | VFTDSDYQLPYVLGSAHEGCLPPFPADVFMIPQYGYLTLNDGSQAVGRS |
| modifications at | | SFYCLEYFPSQMLRTGNNFQFSYEFENVPFHSSYAHSQSLDRLMNPLID |
| positions 600, | | QYLYYLSKTINGSGQNQQTLKFSVAGPSNMAVQGRNYIPGPSYRQQRVS |
| 601, 602, and | | TTVTQNNNSEFAWPGASSWALNGRNSLMNPGPAMASHKEGEDRFFPLSG |
| 604 | | SLIFGKQGTGRDNVDADKVMITNEEEIKTTNPVATESYGQVATNHQSPL |
| 743 aa | | NGAVHLYAQAQLSPVKNQGILPGMVWQDRDVYLQGPIWAKIPHTDGNFH |
| | | PSPLMGGFGMKHPPPQILIKNTPVPADPPTAFNKDKLNSFITQYSTGQV |
| | | SVEIEWELQKENSKRWNPEIQYTSNYYKSNNVEFAVNTEGVYSEPRPIG |
| | | TRYLTRNL |

TABLE 6
Exemplary full length capsid nucleic acid sequences

| | SEQ | |
|---|---|---|
| Name and | ID | |
| Annotation | NO: | NT Sequence |
| TTD-001 | 3623 | atggctgccgatggttatcttccagattggctcgaggacaaccttagtgaaggaattcgc |
| 9mer | | gagtggtgggctttgaaacctggagcccctcaacccaaggcaaatcaacaacatcaagac |
| peptide | | aacgctcgaggtcttgtgcttccgggttacaaataccttggacccggcaacggactcgac |
| underlined | | aagggggagccggtcaacgcagcagacgcggcggccctcgagcacgacaaggcctacgac |
| | | cagcagctcaaggccggagacaacccgtacctcaagtacaaccacgccgacgccgagttc |
| | | caggagcggctcaaagaagatacgtcttttgggggcaacctcgggcgagcagtcttccag |
| | | gccaaaaagaggcttcttgaacctcttggtctggttgaggaagcggctaagacggctcct |
| | | ggaaagaagaggcctgtagagcagtctcctcaggaaccggactcctccgcgggtattggc |
| | | aaatcgggtgcacagcccgctaaaaagagactcaatttcggtcagactggcgacacagag |
| | | tcagtcccagaccctcaaccaatcggagaacctcccgcagccccctcaggtgtgggatct |
| | | cttacaatggcttcaggtggtggcgcaccagtggcagacaataacgaaggtgccgatgga |
| | | gtgggtagttcctcgggaaattggcattgcgattcccaatggctgggggacagagtcatc |
| | | accaccagcacccgaacctgggccctgcccacctacaacaatcacctctacaagcaaatc |
| | | tccaacagcacatctggaggatcttcaaatgacaacgcctacttcggctacagcaccccc |
| | | tgggggtattttgacttcaacagattccactgccacttctcaccacgtgactggcagcga |
| | | ctcatcaacaacaactggggattccggcctaagcgactcaacttcaagctcttcaacatt |
| | | caggtcaaagaggttacggacaacaatggagtcaagaccatcgccaataaccttaccagc |
| | | acggtccaggtcttcacggactcagactatcagctcccgtacgtgctcgggtcggctcac |
| | | gagggctgcctcccgccgttcccagcggacgttttcatgattcctcagtacgggtatctg |
| | | acgcttaatgatggaagccaggccgtgggtcgttcgtccttttactgcctggaatatttc |
| | | ccgtcgcaaatgctaagaacgggtaacaacttccagttcagctacgagtttgagaacgta |
| | | cctttccatagcagctacgctcacagccaaagcctggaccgactaatgaatccactcatc |
| | | gaccaatacttgtactatctctcaaagactattaacggttctggacagaatcaacaaacg |
| | | ctaaaattcagtgtggccggacccagcaacatggctgtccagggaagaaactacatacct |
| | | ggacccagctaccgacaacaacgtgtctcaaccactgtgactcaaaacaacaacagcgaa |
| | | tttgcttggcctggagcttcttcttgggctctcaatggacgtaatagcttgatgaatcct |
| | | ggacctgctatggccagccacaaagaaggagaggaccgtttctttcctttgtctggatct |
| | | ttaatttttggcaaacaaggaactggaagagacaacgtggatgcggacaaagtcatgata |
| | | accaacgaagaagaaattaaaactactaacccggtagcaacggagtcctatggacaagtg |
| | | gccacaaaccaccagagtccgcttaatggtgccgtccatctttatgctcaggcgcagacc |
| | | ggctgggttcaaaaccaaggaatacttccgggtatggtttggcaggacagagatgtgtac |
| | | ctgcaaggacccatttgggccaaaattcctcacacggacggcaactttcacccttctccg |
| | | ctgatgggagggtttggaatgaagcacccgcctcctcagatcctcatcaaaaacacacct |
| | | gtacctgcCgatcctccaacggccttcaacaaggacaagctgaactctttcatcacccag |
| | | tattctactggccaagtcagcgtggagatcgagtgggagctgcagaaggaaaacagcaag |
| | | cgGtggaacccggagatccagtacacttccaactattacaagtctaataatgttgaattt |
| | | gctgttaatactgaaggtgtatatagtgaaccccgccccattggcaccagatacctgact |
| | | cgtaatctgtaa |
| TTD-002 | 3624 | atggctgccgatggttatcttccagattggctcgaggacaaccttagtgaaggaattcgc |
| 7mer | | gagtggtgggctttgaaacctggagcccctcaacccaaggcaaatcaacaacatcaagac |
| peptide | | aacgctcgaggtcttgtgcttccgggttacaaataccttggacccggcaacggactcgac |
| underlined | | aagggggagccggtcaacgcagcagacgcggcggccctcgagcacgacaaggcctacgac |
| | | cagcagctcaaggccggagacaacccgtacctcaagtacaaccacgccgacgccgagttc |
| | | caggagcggctcaaagaagatacgtcttttgggggcaacctcgggcgagcagtcttccag |
| | | gccaaaaagaggcttcttgaacctcttggtctggttgaggaagcggctaagacggctcct |
| | | ggaaagaagaggcctgtagagcagtctcctcaggaaccggactcctccgcgggtattggc |
| | | aaatcgggtgcacagcccgctaaaaagagactcaatttcggtcagactggcgacacagag |
| | | tcagtcccagaccctcaaccaatcggagaacctcccgcagccccctcaggtgtgggatct |
| | | cttacaatggcttcaggtggtggcgcaccagtggcagacaataacgaaggtgccgatgga |
| | | gtgggtagttcctcgggaaattggcattgcgattcccaatggctgggggacagagtcatc |
| | | accaccagcacccgaacctgggccctgcccacctacaacaatcacctctacaagcaaatc |
| | | tccaacagcacatctggaggatcttcaaatgacaacgcctacttcggctacagcaccccc |
| | | tgggggtattttgacttcaacagattccactgccacttctcaccacgtgactggcagcga |
| | | ctcatcaacaacaactggggattccggcctaagcgactcaacttcaagctcttcaacatt |
| | | caggtcaaagaggttacggacaacaatggagtcaagaccatcgccaataaccttaccagc |
| | | acggtccaggtcttcacggactcagactatcagctcccgtacgtgctcgggtcggctcac |
| | | gagggctgcctcccgccgttcccagcggacgttttcatgattcctcagtacgggtatctg |
| | | acgcttaatgatggaagccaggccgtgggtcgttcgtccttttactgcctggaatatttc |
| | | ccgtcgcaaatgctaagaacgggtaacaacttccagttcagctacgagtttgagaacgta |
| | | cctttccatagcagctacgctcacagccaaagcctggaccgactaatgaatccactcatc |
| | | gaccaatacttgtactatctctcaaagactattaacggttctggacagaatcaacaaacg |
| | | ctaaaattcagtgtggccggacccagcaacatggctgtccagggaagaaactacatacct |
| | | ggacccagctaccgacaacaacgtgtctcaaccactgtgactcaaaacaacaacagcgaa |
| | | tttgcttggcctggagcttcttcttgggctctcaatggacgtaatagcttgatgaatcct |
| | | ggacctgctatggccagccacaaagaaggagaggaccgtttctttcctttgtctggatct |
| | | ttaatttttggcaaacaaggaactggaagagacaacgtggatgcggacaaagtcatgata |
| | | accaacgaagaagaaattaaaactactaacccggtagcaacggagtcctatggacaagtg |
| | | gccacaaaccaccagagtgcacaggctcgtgattctccgaagggttggcaggcgcagacc |
| | | ggctgggttcaaaaccaaggaatacttccgggtatggtttggcaggacagagatgtgtac |
| | | ctgcaaggacccatttgggccaaaattcctcacacggacggcaactttcacccttctccg |
| | | ctgatgggagggtttggaatgaagcacccgcctcctcagatcctcatcaaaaacacacct |
| | | gtacctgcCgatcctccaacggccttcaacaaggacaagctgaactctttcatcacccag |
| | | tattctactggccaagtcagcgtggagatcgagtgggagctgcagaaggaaaacagcaag |
| | | cgGtggaacccggagatccagtacacttccaactattacaagtctaataatgttgaattt |
| | | gctgttaatactgaaggtgtatatagtgaaccccgccccattggcaccagatacctgact |
| | | cgtaatctgtaa |
| | 3625 | atggctgccgatggttatcttccagattggctcgaggacaaccttagtgaaggaattcgc |
| | | gagtggtgggctttgaaacctggagcccctcaacccaaggcaaatcaacaacatcaagac |
| | | aacgctcgaggtcttgtgcttccgggttacaaataccttggacccggcaacggactcgac |
| | | aagggggagccggtcaacgcagcagacgcggcggccctcgagcacgacaaggcctacgac |
| | | cagcagctcaaggccggagacaacccgtacctcaagtacaaccacgccgacgccgagttc |
| | | caggagcggctcaaagaagatacgtcttttgggggcaacctcgggcgagcagtcttccag |
| | | gccaaaaagaggcttcttgaacctcttggtctggttgaggaagcggctaagacggctcct |
| | | ggaaagaagaggcctgtagagcagtctcctcaggaaccggactcctccgcgggtattggc |
| | | aaatcgggtgcacagcccgctaaaaagagactcaatttcggtcagactggcgacacagag |
| | | tcagtcccagaccctcaaccaatcggagaacctcccgcagccccctcaggtgtgggatct |
| | | cttacaatggcttcaggtggtggcgcaccagtggcagacaataacgaaggtgccgatgga |
| | | gtgggtagttcctcgggaaattggcattgcgattcccaatggctgggggacagagtcatc |
| | | accaccagcacccgaacctgggccctgcccacctacaacaatcacctctacaagcaaatc |
| | | tccaacagcacatctggaggatcttcaaatgacaacgcctacttcggctacagcaccccc |
| | | tgggggtattttgacttcaacagattccactgccacttctcaccacgtgactggcagcga |
| | | ctcatcaacaacaactggggattccggcctaagcgactcaacttcaagctcttcaacatt |
| | | caggtcaaagaggttacggacaacaatggagtcaagaccatcgccaataaccttaccagc |
| | | acggtccaggtcttcacggactcagactatcagctcccgtacgtgctcgggtcggctcac |
| | | gagggctgcctcccgccgttcccagcggacgttttcatgattcctcagtacgggtatctg |
| | | acgcttaatgatggaagccaggccgtgggtcgttcgtccttttactgcctggaatatttc |
| | | ccgtcgcaaatgctaagaacgggtaacaacttccagttcagctacgagtttgagaacgta |
| | | cctttccatagcagctacgctcacagccaaagcctggaccgactaatgaatccactcatc |
| | | gaccaatacttgtactatctctcaaagactattaacggttctggacagaatcaacaaacg |
| | | ctaaaattcagtgtggccggacccagcaacatggctgtccagggaagaaactacatacct |
| | | ggacccagctaccgacaacaacgtgtctcaaccactgtgactcaaaacaacaacagcgaa |
| | | tttgcttggcctggagcttcttcttgggctctcaatggacgtaatagcttgatgaatcct |
| | | ggacctgctatggccagccacaaagaaggagaggaccgtttctttcctttgtctggatct |
| | | ttaatttttggcaaacaaggaactggaagagacaacgtggatgcggacaaagtcatgata |
| | | accaacgaagaagaaattaaaactactaacccggtagcaacggagtcctatggacaagtg |
| | | gccacaaaccaccagagtgcacaggctcgtgattctccgaagggttggcaggcgcagacc |
| | | ggctgggttcaaaaccaaggaatacttccgggtatggtttggcaggacagagatgtgtac |
| | | ctgcaaggacccatttgggccaaaattcctcacacggacggcaactttcacccttctccg |
| | | ctgatgggagggtttggaatgaagcacccgcctcctcagatcctcatcaaaaacacacct |
| | | gtacctgcggatcctccaacggccttcaacaaggacaagctgaactctttcatcacccag |
| | | tattctactggccaagtcagcgtggagatcgagtgggagctgcagaaggaaaacagcaag |
| | | cgctggaacccggagatccagtacacttccaactattacaagtctaataatgttgaattt |
| | | gctgttaatactgaaggtgtatatagtgaaccccgccccattggcaccagatacctgact |
| | | cgtaatctgtaa |
| TTD-003 | 3626 | atggctgccgatggttatcttccagattggctcgaggacaaccttagtgaaggaattcgc |
| 7mer | | gagtggtgggctttgaaacctggagcccctcaacccaaggcaaatcaacaacatcaagac |
| peptide | | aacgctcgaggtcttgtgcttccgggttacaaataccttggacccggcaacggactcgac |
| underlined | | aagggggagccggtcaacgcagcagacgcggcggccctcgagcacgacaaggcctacgac |
| | | cagcagctcaaggccggagacaacccgtacctcaagtacaaccacgccgacgccgagttc |
| | | caggagcggctcaaagaagatacgtcttttgggggcaacctcgggcgagcagtcttccag |
| | | gccaaaaagaggcttcttgaacctcttggtctggttgaggaagcggctaagacggctcct |
| | | ggaaagaagaggcctgtagagcagtctcctcaggaaccggactcctccgcgggtattggc |
| | | aaatcgggtgcacagcccgctaaaaagagactcaatttcggtcagactggcgacacagag |
| | | tcagtcccagaccctcaaccaatcggagaacctcccgcagccccctcaggtgtgggatct |
| | | cttacaatggcttcaggtggtggcgcaccagtggcagacaataacgaaggtgccgatgga |
| | | gtgggtagttcctcgggaaattggcattgcgattcccaatggctgggggacagagtcatc |
| | | accaccagcacccgaacctgggccctgcccacctacaacaatcacctctacaagcaaatc |
| | | tccaacagcacatctggaggatcttcaaatgacaacgcctacttcggctacagcaccccc |
| | | tgggggtattttgacttcaacagattccactgccacttctcaccacgtgactggcagcga |
| | | ctcatcaacaacaactggggattccggcctaagcgactcaacttcaagctcttcaacatt |
| | | caggtcaaagaggttacggacaacaatggagtcaagaccatcgccaataaccttaccagc |
| | | acggtccaggtcttcacggactcagactatcagctcccgtacgtgctcgggtcggctcac |
| | | gagggctgcctcccgccgttcccagcggacgttttcatgattcctcagtacgggtatctg |
| | | acgcttaatgatggaagccaggccgtgggtcgttcgtccttttactgcctggaatatttc |
| | | ccgtcgcaaatgctaagaacgggtaacaacttccagttcagctacgagtttgagaacgta |
| | | cctttccatagcagctacgctcacagccaaagcctggaccgactaatgaatccactcatc |
| | | gaccaatacttgtactatctctcaaagactattaacggttctggacagaatcaacaaacg |
| | | ctaaaattcagtgtggccggacccagcaacatggctgtccagggaagaaactacatacct |
| | | ggacccagctaccgacaacaacgtgtctcaaccactgtgactcaaaacaacaacagcgaa |
| | | tttgcttggcctggagcttcttcttgggctctcaatggacgtaatagcttgatgaatcct |
| | | ggacctgctatggccagccacaaagaaggagaggaccgtttctttcctttgtctggatct |
| | | ttaatttttggcaaacaaggaactggaagagacaacgtggatgcggacaaagtcatgata |
| | | accaacgaagaagaaattaaaactactaacccggtagcaacggagtcctatggacaagtg |
| | | gccacaaaccaccagagtgcacaggcttattctacggatgtgaggatgcaggcgcagacc |
| | | ggctgggttcaaaaccaaggaatacttccgggtatggtttggcaggacagagatgtgtac |
| | | ctgcaaggacccatttgggccaaaattcctcacacggacggcaactttcacccttctccg |
| | | ctgatgggagggtttggaatgaagcacccgcctcctcagatcctcatcaaaaacacacct |
| | | gtacctgcCgatcctccaacggccttcaacaaggacaagctgaactctttcatcacccag |
| | | tattctactggccaagtcagcgtggagatcgagtgggagctgcagaaggaaaacagcaag |
| | | cgGtggaacccggagatccagtacacttccaactattacaagtctaataatgttgaattt |
| | | gctgttaatactgaaggtgtatatagtgaaccccgccccattggcaccagatacctgact |
| | | cgtaatctgtaa |
| TTD-004 | 3627 | atggctgccgatggttatcttccagattggctcgaggacaaccttagtgaaggaattcgc |
| 7mer | | gagtggtgggctttgaaacctggagcccctcaacccaaggcaaatcaacaacatcaagac |
| peptide | | aacgctcgaggtcttgtgcttccgggttacaaataccttggacccggcaacggactcgac |
| underlined | | aagggggagccggtcaacgcagcagacgcggcggccctcgagcacgacaaggcctacgac |
| | | cagcagctcaaggccggagacaacccgtacctcaagtacaaccacgccgacgccgagttc |
| | | caggagcggctcaaagaagatacgtcttttgggggcaacctcgggcgagcagtcttccag |
| | | gccaaaaagaggcttcttgaacctcttggtctggttgaggaagcggctaagacggctcct |
| | | ggaaagaagaggcctgtagagcagtctcctcaggaaccggactcctccgcgggtattggc |
| | | aaatcgggtgcacagcccgctaaaaagagactcaatttcggtcagactggcgacacagag |
| | | tcagtcccagaccctcaaccaatcggagaacctcccgcagccccctcaggtgtgggatct |
| | | cttacaatggcttcaggtggtggcgcaccagtggcagacaataacgaaggtgccgatgga |
| | | gtgggtagttcctcgggaaattggcattgcgattcccaatggctgggggacagagtcatc |
| | | accaccagcacccgaacctgggccctgcccacctacaacaatcacctctacaagcaaatc |
| | | tccaacagcacatctggaggatcttcaaatgacaacgcctacttcggctacagcaccccc |
| | | tgggggtattttgacttcaacagattccactgccacttctcaccacgtgactggcagcga |
| | | ctcatcaacaacaactggggattccggcctaagcgactcaacttcaagctcttcaacatt |
| | | caggtcaaagaggttacggacaacaatggagtcaagaccatcgccaataaccttaccagc |
| | | acggtccaggtcttcacggactcagactatcagctcccgtacgtgctcgggtcggctcac |
| | | gagggctgcctcccgccgttcccagcggacgttttcatgattcctcagtacgggtatctg |
| | | acgcttaatgatggaagccaggccgtgggtcgttcgtccttttactgcctggaatatttc |
| | | ccgtcgcaaatgctaagaacgggtaacaacttccagttcagctacgagtttgagaacgta |
| | | cctttccatagcagctacgctcacagccaaagcctggaccgactaatgaatccactcatc |
| | | gaccaatacttgtactatctctcaaagactattaacggttctggacagaatcaacaaacg |
| | | ctaaaattcagtgtggccggacccagcaacatggctgtccagggaagaaactacatacct |
| | | ggacccagctaccgacaacaacgtgtctcaaccactgtgactcaaaacaacaacagcgaa |
| | | tttgcttggcctggagcttcttcttgggctctcaatggacgtaatagcttgatgaatcct |
| | | ggacctgctatggccagccacaaagaaggagaggaccgtttctttcctttgtctggatct |
| | | ttaatttttggcaaacaaggaactggaagagacaacgtggatgcggacaaagtcatgata |
| | | accaacgaagaagaaattaaaactactaacccggtagcaacggagtcctatggacaagtg |
| | | gccacaaaccaccagagtgcacagattgttatgaattcgttgaaggctcaggcgcagacc |
| | | ggctgggttcaaaaccaaggaatacttccgggtatggtttggcaggacagagatgtgtac |
| | | ctgcaaggacccatttgggccaaaattcctcacacggacggcaactttcacccttctccg |
| | | ctgatgggagggtttggaatgaagcacccgcctcctcagatcctcatcaaaaacacacct |
| | | gtacctgcCgatcctccaacggccttcaacaaggacaagctgaactctttcatcacccag |
| | | tattctactggccaagtcagcgtggagatcgagtgggagctgcagaaggaaaacagcaag |
| | | cgGtggaacccggagatccagtacacttccaactattacaagtctaataatgttgaattt |
| | | gctgttaatactgaaggtgtatatagtgaaccccgccccattggcaccagatacctgact |
| | | cgtaatctgtaa |
| TTD-005 | 3628 | atggctgccgatggttatcttccagattggctcgaggacaaccttagtgaaggaattcgc |
| 7mer | | gagtggtgggctttgaaacctggagcccctcaacccaaggcaaatcaacaacatcaagac |
| peptide | | aacgctcgaggtcttgtgcttccgggttacaaataccttggacccggcaacggactcgac |
| underlined | | aagggggagccggtcaacgcagcagacgcggcggccctcgagcacgacaaggcctacgac |
| | | cagcagctcaaggccggagacaacccgtacctcaagtacaaccacgccgacgccgagttc |
| | | caggagcggctcaaagaagatacgtcttttgggggcaacctcgggcgagcagtcttccag |
| | | gccaaaaagaggcttcttgaacctcttggtctggttgaggaagcggctaagacggctcct |
| | | ggaaagaagaggcctgtagagcagtctcctcaggaaccggactcctccgcgggtattggc |
| | | aaatcgggtgcacagcccgctaaaaagagactcaatttcggtcagactggcgacacagag |
| | | tcagtcccagaccctcaaccaatcggagaacctcccgcagccccctcaggtgtgggatct |
| | | cttacaatggcttcaggtggtggcgcaccagtggcagacaataacgaaggtgccgatgga |
| | | gtgggtagttcctcgggaaattggcattgcgattcccaatggctgggggacagagtcatc |
| | | accaccagcacccgaacctgggccctgcccacctacaacaatcacctctacaagcaaatc |
| | | tccaacagcacatctggaggatcttcaaatgacaacgcctacttcggctacagcaccccc |
| | | tgggggtattttgacttcaacagattccactgccacttctcaccacgtgactggcagcga |
| | | ctcatcaacaacaactggggattccggcctaagcgactcaacttcaagctcttcaacatt |
| | | caggtcaaagaggttacggacaacaatggagtcaagaccatcgccaataaccttaccagc |
| | | acggtccaggtcttcacggactcagactatcagctcccgtacgtgctcgggtcggctcac |
| | | gagggctgcctcccgccgttcccagcggacgttttcatgattcctcagtacgggtatctg |
| | | acgcttaatgatggaagccaggccgtgggtcgttcgtccttttactgcctggaatatttc |
| | | ccgtcgcaaatgctaagaacgggtaacaacttccagttcagctacgagtttgagaacgta |
| | | cctttccatagcagctacgctcacagccaaagcctggaccgactaatgaatccactcatc |
| | | gaccaatacttgtactatctctcaaagactattaacggttctggacagaatcaacaaacg |
| | | ctaaaattcagtgtggccggacccagcaacatggctgtccagggaagaaactacatacct |
| | | ggacccagctaccgacaacaacgtgtctcaaccactgtgactcaaaacaacaacagcgaa |
| | | tttgcttggcctggagcttcttcttgggctctcaatggacgtaatagcttgatgaatcct |
| | | ggacctgctatggccagccacaaagaaggagaggaccgtttctttcctttgtctggatct |
| | | ttaatttttggcaaacaaggaactggaagagacaacgtggatgcggacaaagtcatgata |
| | | accaacgaagaagaaattaaaactactaacccggtagcaacggagtcctatggacaagtg |
| | | gccacaaaccaccagagtgcacaggctcgggagagtcctcgtgggctgcaggcgcagacc |
| | | ggctgggttcaaaaccaaggaatacttccgggtatggtttggcaggacagagatgtgtac |
| | | ctgcaaggacccatttgggccaaaattcctcacacggacggcaactttcacccttctccg |
| | | ctgatgggagggtttggaatgaagcacccgcctcctcagatcctcatcaaaaacacacct |
| | | gtacctgcCgatcctccaacggccttcaacaaggacaagctgaactctttcatcacccag |
| | | tattctactggccaagtcagcgtggagatcgagtgggagctgcagaaggaaaacagcaag |
| | | cgGtggaacccggagatccagtacacttccaactattacaagtctaataatgttgaattt |
| | | gctgttaatactgaaggtgtatatagtgaaccccgccccattggcaccagatacctgact |
| | | cgtaatctgtaa |
| TTD-006 | 3629 | atggctgccgatggttatcttccagattggctcgaggacaaccttagtgaaggaattcgc |
| 7mer | | gagtggtgggctttgaaacctggagcccctcaacccaaggcaaatcaacaacatcaagac |
| peptide | | aacgctcgaggtcttgtgcttccgggttacaaataccttggacccggcaacggactcgac |
| underlined | | aagggggagccggtcaacgcagcagacgcggcggccctcgagcacgacaaggcctacgac |
| | | cagcagctcaaggccggagacaacccgtacctcaagtacaaccacgccgacgccgagttc |
| | | caggagcggctcaaagaagatacgtcttttgggggcaacctcgggcgagcagtcttccag |
| | | gccaaaaagaggcttcttgaacctcttggtctggttgaggaagcggctaagacggctcct |
| | | ggaaagaagaggcctgtagagcagtctcctcaggaaccggactcctccgcgggtattggc |
| | | aaatcgggtgcacagcccgctaaaaagagactcaatttcggtcagactggcgacacagag |
| | | tcagtcccagaccctcaaccaatcggagaacctcccgcagccccctcaggtgtgggatct |
| | | cttacaatggcttcaggtggtggcgcaccagtggcagacaataacgaaggtgccgatgga |
| | | gtgggtagttcctcgggaaattggcattgcgattcccaatggctgggggacagagtcatc |
| | | accaccagcacccgaacctgggccctgcccacctacaacaatcacctctacaagcaaatc |
| | | tccaacagcacatctggaggatcttcaaatgacaacgcctacttcggctacagcaccccc |
| | | tgggggtattttgacttcaacagattccactgccacttctcaccacgtgactggcagcga |
| | | ctcatcaacaacaactggggattccggcctaagcgactcaacttcaagctcttcaacatt |
| | | caggtcaaagaggttacggacaacaatggagtcaagaccatcgccaataaccttaccagc |
| | | acggtccaggtcttcacggactcagactatcagctcccgtacgtgctcgggtcggctcac |
| | | gagggctgcctcccgccgttcccagcggacgttttcatgattcctcagtacgggtatctg |
| | | acgcttaatgatggaagccaggccgtgggtcgttcgtccttttactgcctggaatatttc |
| | | ccgtcgcaaatgctaagaacgggtaacaacttccagttcagctacgagtttgagaacgta |
| | | cctttccatagcagctacgctcacagccaaagcctggaccgactaatgaatccactcatc |
| | | gaccaatacttgtactatctctcaaagactattaacggttctggacagaatcaacaaacg |
| | | ctaaaattcagtgtggccggacccagcaacatggctgtccagggaagaaactacatacct |
| | | ggacccagctaccgacaacaacgtgtctcaaccactgtgactcaaaacaacaacagcgaa |
| | | tttgcttggcctggagcttcttcttgggctctcaatggacgtaatagcttgatgaatcct |
| | | ggacctgctatggccagccacaaagaaggagaggaccgtttctttcctttgtctggatct |
| | | ttaatttttggcaaacaaggaactggaagagacaacgtggatgcggacaaagtcatgata |
| | | accaacgaagaagaaattaaaactactaacccggtagcaacggagtcctatggacaagtg |
| | | gccacaaaccaccagagtgcacaggctagttttaatgatactagggctcaggcgcagacc |
| | | ggctgggttcaaaaccaaggaatacttccgggtatggtttggcaggacagagatgtgtac |
| | | ctgcaaggacccatttgggccaaaattcctcacacggacggcaactttcacccttctccg |
| | | ctgatgggagggtttggaatgaagcacccgcctcctcagatcctcatcaaaaacacacct |
| | | gtacctgcCgatcctccaacggccttcaacaaggacaagctgaactctttcatcacccag |
| | | tattctactggccaagtcagcgtggagatcgagtgggagctgcagaaggaaaacagcaag |
| | | cgGtggaacccggagatccagtacacttccaactattacaagtctaataatgttgaattt |
| | | gctgttaatactgaaggtgtatatagtgaaccccgccccattggcaccagatacctgact |
| | | cgtaatctgtaa |
| TTD-007 | 3630 | atggctgccgatggttatcttccagattggctcgaggacaaccttagtgaaggaattcgc |
| 9mer | | gagtggtgggctttgaaacctggagcccctcaacccaaggcaaatcaacaacatcaagac |
| peptide | | aacgctcgaggtcttgtgcttccgggttacaaataccttggacccggcaacggactcgac |
| underlined | | aagggggagccggtcaacgcagcagacgcggcggccctcgagcacgacaaggcctacgac |
| | | cagcagctcaaggccggagacaacccgtacctcaagtacaaccacgccgacgccgagttc |
| | | caggagcggctcaaagaagatacgtcttttgggggcaacctcgggcgagcagtcttccag |
| | | gccaaaaagaggcttcttgaacctcttggtctggttgaggaagcggctaagacggctcct |
| | | ggaaagaagaggcctgtagagcagtctcctcaggaaccggactcctccgcgggtattggc |
| | | aaatcgggtgcacagcccgctaaaaagagactcaatttcggtcagactggcgacacagag |
| | | tcagtcccagaccctcaaccaatcggagaacctcccgcagccccctcaggtgtgggatct |
| | | cttacaatggcttcaggtggtggcgcaccagtggcagacaataacgaaggtgccgatgga |
| | | gtgggtagttcctcgggaaattggcattgcgattcccaatggctgggggacagagtcatc |
| | | accaccagcacccgaacctgggccctgcccacctacaacaatcacctctacaagcaaatc |
| | | tccaacagcacatctggaggatcttcaaatgacaacgcctacttcggctacagcaccccc |
| | | tgggggtattttgacttcaacagattccactgccacttctcaccacgtgactggcagcga |
| | | ctcatcaacaacaactggggattccggcctaagcgactcaacttcaagctcttcaacatt |
| | | caggtcaaagaggttacggacaacaatggagtcaagaccatcgccaataaccttaccagc |
| | | acggtccaggtcttcacggactcagactatcagctcccgtacgtgctcgggtcggctcac |
| | | gagggctgcctcccgccgttcccagcggacgttttcatgattcctcagtacgggtatctg |
| | | acgcttaatgatggaagccaggccgtgggtcgttcgtccttttactgcctggaatatttc |
| | | ccgtcgcaaatgctaagaacgggtaacaacttccagttcagctacgagtttgagaacgta |
| | | cctttccatagcagctacgctcacagccaaagcctggaccgactaatgaatccactcatc |
| | | gaccaatacttgtactatctctcaaagactattaacggttctggacagaatcaacaaacg |
| | | ctaaaattcagtgtggccggacccagcaacatggctgtccagggaagaaactacatacct |
| | | ggacccagctaccgacaacaacgtgtctcaaccactgtgactcaaaacaacaacagcgaa |
| | | tttgcttggcctggagcttcttcttgggctctcaatggacgtaatagcttgatgaatcct |
| | | ggacctgctatggccagccacaaagaaggagaggaccgtttctttcctttgtctggatct |
| | | ttaatttttggcaaacaaggaactggaagagacaacgtggatgcggacaaagtcatgata |
| | | accaacgaagaagaaattaaaactactaacccggtagcaacggagtcctatggacaagtg |
| | | gccacaaaccaccagagtggtggtacgttggccgtcgtgtcgcttgctcaggcgcagacc |
| | | ggctgggttcaaaaccaaggaatacttccgggtatggtttggcaggacagagatgtgtac |
| | | ctgcaaggacccatttgggccaaaattcctcacacggacggcaactttcacccttctccg |
| | | ctgatgggagggtttggaatgaagcacccgcctcctcagatcctcatcaaaaacacacct |
| | | gtacctgcCgatcctccaacggccttcaacaaggacaagctgaactctttcatcacccag |
| | | tattctactggccaagtcagcgtggagatcgagtgggagctgcagaaggaaaacagcaag |
| | | cgGtggaacccggagatccagtacacttccaactattacaagtctaataatgttgaattt |
| | | gctgttaatactgaaggtgtatatagtgaaccccgccccattggcaccagatacctgact |
| | | cgtaatctgtaa |
| TTD-008 | 3631 | atggctgccgatggttatcttccagattggctcgaggacaaccttagtgaaggaattcgc |
| 7mer | | gagtggtgggctttgaaacctggagcccctcaacccaaggcaaatcaacaacatcaagac |
| peptide | | aacgctcgaggtcttgtgcttccgggttacaaataccttggacccggcaacggactcgac |
| underlined | | aagggggagccggtcaacgcagcagacgcggcggccctcgagcacgacaaggcctacgac |
| | | cagcagctcaaggccggagacaacccgtacctcaagtacaaccacgccgacgccgagttc |
| | | caggagcggctcaaagaagatacgtcttttgggggcaacctcgggcgagcagtcttccag |
| | | gccaaaaagaggcttcttgaacctcttggtctggttgaggaagcggctaagacggctcct |
| | | ggaaagaagaggcctgtagagcagtctcctcaggaaccggactcctccgcgggtattggc |
| | | aaatcgggtgcacagcccgctaaaaagagactcaatttcggtcagactggcgacacagag |
| | | tcagtcccagaccctcaaccaatcggagaacctcccgcagccccctcaggtgtgggatct |
| | | cttacaatggcttcaggtggtggcgcaccagtggcagacaataacgaaggtgccgatgga |
| | | gtgggtagttcctcgggaaattggcattgcgattcccaatggctgggggacagagtcatc |
| | | accaccagcacccgaacctgggccctgcccacctacaacaatcacctctacaagcaaatc |
| | | tccaacagcacatctggaggatcttcaaatgacaacgcctacttcggctacagcaccccc |
| | | tgggggtattttgacttcaacagattccactgccacttctcaccacgtgactggcagcga |
| | | ctcatcaacaacaactggggattccggcctaagcgactcaacttcaagctcttcaacatt |
| | | caggtcaaagaggttacggacaacaatggagtcaagaccatcgccaataaccttaccagc |
| | | acggtccaggtcttcacggactcagactatcagctcccgtacgtgctcgggtcggctcac |
| | | gagggctgcctcccgccgttcccagcggacgttttcatgattcctcagtacgggtatctg |
| | | acgcttaatgatggaagccaggccgtgggtcgttcgtccttttactgcctggaatatttc |
| | | ccgtcgcaaatgctaagaacgggtaacaacttccagttcagctacgagtttgagaacgta |
| | | cctttccatagcagctacgctcacagccaaagcctggaccgactaatgaatccactcatc |
| | | gaccaatacttgtactatctctcaaagactattaacggttctggacagaatcaacaaacg |
| | | ctaaaattcagtgtggccggacccagcaacatggctgtccagggaagaaactacatacct |
| | | ggacccagctaccgacaacaacgtgtctcaaccactgtgactcaaaacaacaacagcgaa |
| | | tttgcttggcctggagcttcttcttgggctctcaatggacgtaatagcttgatgaatcct |
| | | ggacctgctatggccagccacaaagaaggagaggaccgtttctttcctttgtctggatct |
| | | ttaatttttggcaaacaaggaactggaagagacaacgtggatgcggacaaagtcatgata |
| | | accaacgaagaagaaattaaaactactaacccggtagcaacggagtcctatggacaagtg |
| | | gccacaaaccaccagagtgcacaggcttatgggttgccgaagggtcctcaggcgcagacc |
| | | ggctgggttcaaaaccaaggaatacttccgggtatggtttggcaggacagagatgtgtac |
| | | ctgcaaggacccatttgggccaaaattcctcacacggacggcaactttcacccttctccg |
| | | ctgatgggagggtttggaatgaagcacccgcctcctcagatcctcatcaaaaacacacct |
| | | gtacctgcCgatcctccaacggccttcaacaaggacaagctgaactctttcatcacccag |
| | | tattctactggccaagtcagcgtggagatcgagtgggagctgcagaaggaaaacagcaag |
| | | cgGtggaacccggagatccagtacacttccaactattacaagtctaataatgttgaattt |
| | | gctgttaatactgaaggtgtatatagtgaaccccgccccattggcaccagatacctgact |
| | | cgtaatctgtaa |
| TTD-009 | 3632 | atggctgccgatggttatcttccagattggctcgaggacaaccttagtgaaggaattcgc |
| 7mer | | gagtggtgggctttgaaacctggagcccctcaacccaaggcaaatcaacaacatcaagac |
| peptide | | aacgctcgaggtcttgtgcttccgggttacaaataccttggacccggcaacggactcgac |
| underlined | | aagggggagccggtcaacgcagcagacgcggcggccctcgagcacgacaaggcctacgac |
| | | cagcagctcaaggccggagacaacccgtacctcaagtacaaccacgccgacgccgagttc |
| | | caggagcggctcaaagaagatacgtcttttgggggcaacctcgggcgagcagtcttccag |
| | | gccaaaaagaggcttcttgaacctcttggtctggttgaggaagcggctaagacggctcct |
| | | ggaaagaagaggcctgtagagcagtctcctcaggaaccggactcctccgcgggtattggc |
| | | aaatcgggtgcacagcccgctaaaaagagactcaatttcggtcagactggcgacacagag |
| | | tcagtcccagaccctcaaccaatcggagaacctcccgcagccccctcaggtgtgggatct |
| | | cttacaatggcttcaggtggtggcgcaccagtggcagacaataacgaaggtgccgatgga |
| | | gtgggtagttcctcgggaaattggcattgcgattcccaatggctgggggacagagtcatc |
| | | accaccagcacccgaacctgggccctgcccacctacaacaatcacctctacaagcaaatc |
| | | tccaacagcacatctggaggatcttcaaatgacaacgcctacttcggctacagcaccccc |
| | | tgggggtattttgacttcaacagattccactgccacttctcaccacgtgactggcagcga |
| | | ctcatcaacaacaactggggattccggcctaagcgactcaacttcaagctcttcaacatt |
| | | caggtcaaagaggttacggacaacaatggagtcaagaccatcgccaataaccttaccagc |
| | | acggtccaggtcttcacggactcagactatcagctcccgtacgtgctcgggtcggctcac |
| | | gagggctgcctcccgccgttcccagcggacgttttcatgattcctcagtacgggtatctg |
| | | acgcttaatgatggaagccaggccgtgggtcgttcgtccttttactgcctggaatatttc |
| | | ccgtcgcaaatgctaagaacgggtaacaacttccagttcagctacgagtttgagaacgta |
| | | cctttccatagcagctacgctcacagccaaagcctggaccgactaatgaatccactcatc |
| | | gaccaatacttgtactatctctcaaagactattaacggttctggacagaatcaacaaacg |
| | | ctaaaattcagtgtggccggacccagcaacatggctgtccagggaagaaactacatacct |
| | | ggacccagctaccgacaacaacgtgtctcaaccactgtgactcaaaacaacaacagcgaa |
| | | tttgcttggcctggagcttcttcttgggctctcaatggacgtaatagcttgatgaatcct |
| | | ggacctgctatggccagccacaaagaaggagaggaccgtttctttcctttgtctggatct |
| | | ttaatttttggcaaacaaggaactggaagagacaacgtggatgcggacaaagtcatgata |
| | | accaacgaagaagaaattaaaactactaacccggtagcaacggagtcctatggacaagtg |
| | | gccacaaaccaccagagtgcacaggcttcgactgggacgcttcggcttcaggcgcagacc |
| | | ggctgggttcaaaaccaaggaatacttccgggtatggtttggcaggacagagatgtgtac |
| | | ctgcaaggacccatttgggccaaaattcctcacacggacggcaactttcacccttctccg |
| | | ctgatgggagggtttggaatgaagcacccgcctcctcagatcctcatcaaaaacacacct |
| | | gtacctgcCgatcctccaacggccttcaacaaggacaagctgaactctttcatcacccag |
| | | tattctactggccaagtcagcgtggagatcgagtgggagctgcagaaggaaaacagcaag |
| | | cgGtggaacccggagatccagtacacttccaactattacaagtctaataatgttgaattt |
| | | gctgttaatactgaaggtgtatatagtgaaccccgccccattggcaccagatacctgact |
| | | cgtaatctgtaa |
| TTD-010 | 3633 | atggctgccgatggttatcttccagattggctcgaggacaaccttagtgaaggaattcgc |
| 7mer | | gagtggtgggctttgaaacctggagcccctcaacccaaggcaaatcaacaacatcaagac |
| peptide | | aacgctcgaggtcttgtgcttccgggttacaaataccttggacccggcaacggactcgac |
| underlined | | aagggggagccggtcaacgcagcagacgcggcggccctcgagcacgacaaggcctacgac |
| | | cagcagctcaaggccggagacaacccgtacctcaagtacaaccacgccgacgccgagttc |
| | | caggagcggctcaaagaagatacgtcttttgggggcaacctcgggcgagcagtcttccag |
| | | gccaaaaagaggcttcttgaacctcttggtctggttgaggaagcggctaagacggctcct |
| | | ggaaagaagaggcctgtagagcagtctcctcaggaaccggactcctccgcgggtattggc |
| | | aaatcgggtgcacagcccgctaaaaagagactcaatttcggtcagactggcgacacagag |
| | | tcagtcccagaccctcaaccaatcggagaacctcccgcagccccctcaggtgtgggatct |
| | | cttacaatggcttcaggtggtggcgcaccagtggcagacaataacgaaggtgccgatgga |
| | | gtgggtagttcctcgggaaattggcattgcgattcccaatggctgggggacagagtcatc |
| | | accaccagcacccgaacctgggccctgcccacctacaacaatcacctctacaagcaaatc |
| | | tccaacagcacatctggaggatcttcaaatgacaacgcctacttcggctacagcaccccc |
| | | tgggggtattttgacttcaacagattccactgccacttctcaccacgtgactggcagcga |
| | | ctcatcaacaacaactggggattccggcctaagcgactcaacttcaagctcttcaacatt |
| | | caggtcaaagaggttacggacaacaatggagtcaagaccatcgccaataaccttaccagc |
| | | acggtccaggtcttcacggactcagactatcagctcccgtacgtgctcgggtcggctcac |
| | | gagggctgcctcccgccgttcccagcggacgttttcatgattcctcagtacgggtatctg |
| | | acgcttaatgatggaagccaggccgtgggtcgttcgtccttttactgcctggaatatttc |
| | | ccgtcgcaaatgctaagaacgggtaacaacttccagttcagctacgagtttgagaacgta |
| | | cctttccatagcagctacgctcacagccaaagcctggaccgactaatgaatccactcatc |
| | | gaccaatacttgtactatctctcaaagactattaacggttctggacagaatcaacaaacg |
| | | ctaaaattcagtgtggccggacccagcaacatggctgtccagggaagaaactacatacct |
| | | ggacccagctaccgacaacaacgtgtctcaaccactgtgactcaaaacaacaacagcgaa |
| | | tttgcttggcctggagcttcttcttgggctctcaatggacgtaatagcttgatgaatcct |
| | | ggacctgctatggccagccacaaagaaggagaggaccgtttctttcctttgtctggatct |
| | | ttaatttttggcaaacaaggaactggaagagacaacgtggatgcggacaaagtcatgata |
| | | accaacgaagaagaaattaaaactactaacccggtagcaacggagtcctatggacaagtg |
| | | gccacaaaccaccagagtgcgcaggcgtattcgacggatgagaggatgcaggcgcagacc |
| | | ggctgggttcaaaaccaaggaatacttccgggtatggtttggcaggacagagatgtgtac |
| | | ctgcaaggacccatttgggccaaaattcctcacacggacggcaactttcacccttctccg |
| | | ctgatgggagggtttggaatgaagcacccgcctcctcagatcctcatcaaaaacacacct |
| | | gtacctgcCgatcctccaacggccttcaacaaggacaagctgaactctttcatcacccag |
| | | tattctactggccaagtcagcgtggagatcgagtgggagctgcagaaggaaaacagcaag |
| | | cgGtggaacccggagatccagtacacttccaactattacaagtctaataatgttgaattt |
| | | gctgttaatactgaaggtgtatatagtgaaccccgccccattggcaccagatacctgact |
| | | cgtaatctgtaa |
| TTD-011 | 3634 | atggctgccgatggttatcttccagattggctcgaggacaaccttagtgaaggaattcgc |
| 7mer | | gagtggtgggctttgaaacctggagcccctcaacccaaggcaaatcaacaacatcaagac |
| peptide | | aacgctcgaggtcttgtgcttccgggttacaaataccttggacccggcaacggactcgac |
| underlined | | aagggggagccggtcaacgcagcagacgcggcggccctcgagcacgacaaggcctacgac |
| | | cagcagctcaaggccggagacaacccgtacctcaagtacaaccacgccgacgccgagttc |
| | | caggagcggctcaaagaagatacgtcttttgggggcaacctcgggcgagcagtcttccag |
| | | gccaaaaagaggcttcttgaacctcttggtctggttgaggaagcggctaagacggctcct |
| | | ggaaagaagaggcctgtagagcagtctcctcaggaaccggactcctccgcgggtattggc |
| | | aaatcgggtgcacagcccgctaaaaagagactcaatttcggtcagactggcgacacagag |
| | | tcagtcccagaccctcaaccaatcggagaacctcccgcagccccctcaggtgtgggatct |
| | | cttacaatggcttcaggtggtggcgcaccagtggcagacaataacgaaggtgccgatgga |
| | | gtgggtagttcctcgggaaattggcattgcgattcccaatggctgggggacagagtcatc |
| | | accaccagcacccgaacctgggccctgcccacctacaacaatcacctctacaagcaaatc |
| | | tccaacagcacatctggaggatcttcaaatgacaacgcctacttcggctacagcaccccc |
| | | tgggggtattttgacttcaacagattccactgccacttctcaccacgtgactggcagcga |
| | | ctcatcaacaacaactggggattccggcctaagcgactcaacttcaagctcttcaacatt |
| | | caggtcaaagaggttacggacaacaatggagtcaagaccatcgccaataaccttaccagc |
| | | acggtccaggtcttcacggactcagactatcagctcccgtacgtgctcgggtcggctcac |
| | | gagggctgcctcccgccgttcccagcggacgttttcatgattcctcagtacgggtatctg |
| | | acgcttaatgatggaagccaggccgtgggtcgttcgtccttttactgcctggaatatttc |
| | | ccgtcgcaaatgctaagaacgggtaacaacttccagttcagctacgagtttgagaacgta |
| | | cctttccatagcagctacgctcacagccaaagcctggaccgactaatgaatccactcatc |
| | | gaccaatacttgtactatctctcaaagactattaacggttctggacagaatcaacaaacg |
| | | ctaaaattcagtgtggccggacccagcaacatggctgtccagggaagaaactacatacct |
| | | ggacccagctaccgacaacaacgtgtctcaaccactgtgactcaaaacaacaacagcgaa |
| | | tttgcttggcctggagcttcttcttgggctctcaatggacgtaatagcttgatgaatcct |
| | | ggacctgctatggccagccacaaagaaggagaggaccgtttctttcctttgtctggatct |
| | | ttaatttttggcaaacaaggaactggaagagacaacgtggatgcggacaaagtcatgata |
| | | accaacgaagaagaaattaaaactactaacccggtagcaacggagtcctatggacaagtg |
| | | gccacaaaccaccagagtgcgcaggcgtattcgacggatgagaggaagcaggcgcagacc |
| | | ggctgggttcaaaaccaaggaatacttccgggtatggtttggcaggacagagatgtgtac |
| | | ctgcaaggacccatttgggccaaaattcctcacacggacggcaactttcacccttctccg |
| | | ctgatgggagggtttggaatgaagcacccgcctcctcagatcctcatcaaaaacacacct |
| | | gtacctgcCgatcctccaacggccttcaacaaggacaagctgaactctttcatcacccag |
| | | tattctactggccaagtcagcgtggagatcgagtgggagctgcagaaggaaaacagcaag |
| | | cgGtggaacccggagatccagtacacttccaactattacaagtctaataatgttgaattt |
| | | gctgttaatactgaaggtgtatatagtgaaccccgccccattggcaccagatacctgact |
| | | cgtaatctgtaa |
| TTD-012 | 3635 | atggctgccgatggttatcttccagattggctcgaggacaaccttagtgaaggaattcgc |
| 7mer | | gagtggtgggctttgaaacctggagcccctcaacccaaggcaaatcaacaacatcaagac |
| peptide | | aacgctcgaggtcttgtgcttccgggttacaaataccttggacccggcaacggactcgac |
| underlined | | aagggggagccggtcaacgcagcagacgcggcggccctcgagcacgacaaggcctacgac |
| | | cagcagctcaaggccggagacaacccgtacctcaagtacaaccacgccgacgccgagttc |
| | | caggagcggctcaaagaagatacgtcttttgggggcaacctcgggcgagcagtcttccag |
| | | gccaaaaagaggcttcttgaacctcttggtctggttgaggaagcggctaagacggctcct |
| | | ggaaagaagaggcctgtagagcagtctcctcaggaaccggactcctccgcgggtattggc |
| | | aaatcgggtgcacagcccgctaaaaagagactcaatttcggtcagactggcgacacagag |
| | | tcagtcccagaccctcaaccaatcggagaacctcccgcagccccctcaggtgtgggatct |
| | | cttacaatggcttcaggtggtggcgcaccagtggcagacaataacgaaggtgccgatgga |
| | | gtgggtagttcctcgggaaattggcattgcgattcccaatggctgggggacagagtcatc |
| | | accaccagcacccgaacctgggccctgcccacctacaacaatcacctctacaagcaaatc |
| | | tccaacagcacatctggaggatcttcaaatgacaacgcctacttcggctacagcaccccc |
| | | tgggggtattttgacttcaacagattccactgccacttctcaccacgtgactggcagcga |
| | | ctcatcaacaacaactggggattccggcctaagcgactcaacttcaagctcttcaacatt |
| | | caggtcaaagaggttacggacaacaatggagtcaagaccatcgccaataaccttaccagc |
| | | acggtccaggtcttcacggactcagactatcagctcccgtacgtgctcgggtcggctcac |
| | | gagggctgcctcccgccgttcccagcggacgttttcatgattcctcagtacgggtatctg |
| | | acgcttaatgatggaagccaggccgtgggtcgttcgtccttttactgcctggaatatttc |
| | | ccgtcgcaaatgctaagaacgggtaacaacttccagttcagctacgagtttgagaacgta |
| | | cctttccatagcagctacgctcacagccaaagcctggaccgactaatgaatccactcatc |
| | | gaccaatacttgtactatctctcaaagactattaacggttctggacagaatcaacaaacg |
| | | ctaaaattcagtgtggccggacccagcaacatggctgtccagggaagaaactacatacct |
| | | ggacccagctaccgacaacaacgtgtctcaaccactgtgactcaaaacaacaacagcgaa |
| | | tttgcttggcctggagcttcttcttgggctctcaatggacgtaatagcttgatgaatcct |
| | | ggacctgctatggccagccacaaagaaggagaggaccgtttctttcctttgtctggatct |
| | | ttaatttttggcaaacaaggaactggaagagacaacgtggatgcggacaaagtcatgata |
| | | accaacgaagaagaaattaaaactactaacccggtagcaacggagtcctatggacaagtg |
| | | gccacaaaccaccagagtgcacaggcttatgtttcgtctgttaagatgcaggcgcagacc |
| | | ggctgggttcaaaaccaaggaatacttccgggtatggtttggcaggacagagatgtgtac |
| | | ctgcaaggacccatttgggccaaaattcctcacacggacggcaactttcacccttctccg |
| | | ctgatgggagggtttggaatgaagcacccgcctcctcagatcctcatcaaaaacacacct |
| | | gtacctgcCgatcctccaacggccttcaacaaggacaagctgaactctttcatcacccag |
| | | tattctactggccaagtcagcgtggagatcgagtgggagctgcagaaggaaaacagcaag |
| | | cgGtggaacccggagatccagtacacttccaactattacaagtctaataatgttgaattt |
| | | gctgttaatactgaaggtgtatatagtgaaccccgccccattggcaccagatacctgact |
| | | cgtaatctgtaa |
| TTD-013 | 5 | MAADGYLPDWLEDNLSEGIREWWALKPGAPQPKANQQHQDNARGLVLPGYKYLG |
| 9mer | | PGNGLDKGEPVNAADAAALEHDKAYDQQLKAGDNPYLKYNHADAEFQERLKEDT |
| peptide | | SFGGNLGRAVFQAKKRLLEPLGLVEEAAKTAPGKKRPVEQSPQEPDSSAGIGKS |
| underlined, | | GAQPAKKRLNFGQTGDTESVPDPQPIGEPPAAPSGVGSLTMASGGGAPVADNNE |
| starts at | | GADGVGSSSGNWHCDSQWLGDRVITTSTRTWALPTYNNHLYKQISNSTSGGSSN |
| position 587 | | DNAYFGYSTPWGYFDFNRFHCHFSPRDWQRLINNNWGFRPKRLNFKLFNIQVKE |
| (immediately | | VTDNNGVKTIANNLTSTVQVFTDSDYQLPYVLGSAHEGCLPPFPADVFMIPQYG |
| subsequent | | YLTLNDGSQAVGRSSFYCLEYFPSQMLRTGNNFQFSYEFENVPFHSSYAHSQSL |
| to position | | DRLMNPLIDQYLYYLSKTINGSGQNQQTLKFSVAGPSNMAVQGRNYIPGPSYRQ |
| 586); | | QRVSTTVTQNNNSEFAWPGASSWALNGRNSLMNPGPAMASHKEGEDRFFPLSGS |
| modification | | LIFGKQGTGRDNVDADKVMITNEEEIKTTNPVATESYGQVATNHQSPLNGAVHL |
| at position | | YAQAQTGWVPNQGILPGMVWQDRDVYLQGPIWAKIPHTDGNFHPSPLMGGFGMK |
| 604; | | HPPPQILIKNTPVPADPPTAFNKDKLNSFITQYSTGQVSVEIEWELQKENSKRW |
| 743 aa | | NPEIQYTSNYYKSNNVEFAVNTEGVYSEPRPIGTRYLTRNL |
| TTD-014 | 8 | MAADGYLPDWLEDNLSEGIREWWALKPGAPQPKANQQHQDNARGLVLPGYKYLG |
| 9mer | | PGNGLDKGEPVNAADAAALEHDKAYDQQLKAGDNPYLKYNHADAEFQERLKEDT |
| peptide | | SFGGNLGRAVFQAKKRLLEPLGLVEEAAKTAPGKKRPVEQSPQEPDSSAGIGKS |
| underlined, | | GAQPAKKRLNFGQTGDTESVPDPQPIGEPPAAPSGVGSLTMASGGGAPVADNNE |
| starts at | | GADGVGSSSGNWHCDSQWLGDRVITTSTRTWALPTYNNHLYKQISNSTSGGSSN |
| position 587 | | DNAYFGYSTPWGYFDFNRFHCHFSPRDWQRLINNNWGFRPKRLNFKLFNIQVKE |
| (immediately | | VTDNNGVKTIANNLTSTVQVFTDSDYQLPYVLGSAHEGCLPPFPADVFMIPQYG |
| subsequent | | YLTLNDGSQAVGRSSFYCLEYFPSQMLRTGNNFQFSYEFENVPFHSSYAHSQSL |
| to position | | DRLMNPLIDQYLYYLSKTINGSGQNQQTLKFSVAGPSNMAVQGRNYIPGPSYRQ |
| 586); | | QRVSTTVTQNNNSEFAWPGASSWALNGRNSLMNPGPAMASHKEGEDRFFPLSGS |
| modifica- | | LIFGKQGTGRDNVDADKVMITNEEEIKTTNPVATESYGQVATNHQSPLNGAVHL |
| tions at | | YAQAQLSPVKNQGILPGMVWQDRDVYLQGPIWAKIPHTDGNFHPSPLMGGFGMK |
| positions | | HPPPQILIKNTPVPADPPTAFNKDKLNSFITQYSTGQVSVEIEWELQKENSKRW |
| 600, 601, | | NPEIQYTSNYYKSNNVEFAVNTEGVYSEPRPIGTRYLTRNL |
| 602, and 604 | | |
| 743 aa | | |

[1141] In some embodiments, an AAV capsid polypeptide, e.g., an AAV capsid variant, described herein comprises the amino acid sequence of any one of SEQ ID NOs: 3636-3647, or an amino acid sequence with at least 80% (e.g., at least about 85, 90, 95, 96, 97, 98, or 99%) sequence identity thereto. In some embodiments, an AAV capsid variant described herein comprises the amino acid sequence of SEQ ID NO: 3636, or an amino acid sequence with at least 80% (e.g., at least about 85, 90, 95, 96, 97, 98, or 99%) sequence identity thereto. In some embodiments, an AAV capsid variant described herein comprises the amino acid sequence of SEQ ID NO: 3639, or an amino acid sequence with at least 80% (e.g., at least about 85, 90, 95, 96, 97, 98, or 99%) sequence identity thereto.

[1142] In some embodiments, the polynucleotide encoding an AAV capsid polypeptide, e.g., AAV capsid variant, described herein comprises the nucleotide sequence of any one of SEQ ID NOs: 3623-3635, or a nucleotide sequence with at least 80% (e.g., at least about 85, 90, 95, 96, 97, 98, or 99%) sequence identity thereto. In some embodiments, the polynucleotide encoding an AAV capsid variant described herein comprises the nucleotide sequence of SEQ ID NO: 3623, or a nucleotide sequence with at least 80% (e.g., at least about 85, 90, 95, 96, 97, 98, or 99%) sequence identity thereto. In some embodiments, the polynucleotide encoding an AAV capsid variant described herein comprises the nucleotide sequence of SEQ ID NO: 3627, or a nucleotide sequence with at least 80% (e.g., at least about 85, 90, 95, 96, 97, 98, or 99%) sequence identity thereto. In some embodiments, the nucleic acid sequence encoding an AAV capsid polypeptide, e.g., an AAV capsid variant, described herein is codon optimized.

[1143] In some embodiments, the AAV capsid polypeptide, e.g., the AAV capsid variant, comprises a VP2 protein comprising the amino acid sequence corresponding to positions 138-743, of any one of SEQ ID NOs: 3636-3647, or a sequence with at least 80% (e.g., at least about 85, 90, 95, 96, 97, 98, or 99%) sequence identity thereto. In some embodiments, the AAV capsid comprises a VP3 protein comprising the amino acid sequence corresponding to positions 203-743, of any one of SEQ ID NOs: 3636-3647, or a sequence with at least 80% (e.g., at least about 85, 90, 95, 96, 97, 98, or 99%) sequence identity thereto.

[1144] In some embodiments, the AAV capsid polypeptide, e.g., the AAV capsid variant, e.g., an AAV capsid variant described herein, comprises the amino acid sequence of any one of SEQ ID NOs: 3636-3647, or an amino acid sequence with at least 80% (e.g., at least about 85, 90, 95, 96, 97, 98, or 99%) sequence identity thereto. In some embodiments, the AAV capsid polypeptide, e.g., the AAV capsid variant, e.g., an AAV capsid variant described herein, comprises an amino acid sequence comprising at least one, two, or three modifications, substitutions (e.g., conservative substitutions), insertions, or deletions, but not more than 30, 20 or 10 modifications, substitutions (e.g., conservative substitutions), insertions, or deletions relative to the amino acid sequence of any one of SEQ ID NOs: 3636-3647. In some embodiments, the AAV capsid polypeptide, e.g., the AAV capsid variant, e.g., an AAV capsid variant described herein, comprises an amino acid sequence having at least one, two, or three but no more than 30, 20, or 10 different amino acids relative to the amino acid sequence of any one of SEQ ID NOs: 3636-3647.

[1145] In some embodiments, the AAV capsid polypeptide, e.g., the AAV capsid variant, e.g., an AAV capsid variant described herein, comprises the amino acid sequence of SEQ ID NO: 3636, or an amino acid sequence with at least 80% (e.g., at least about 85, 90, 95, 96, 97, 98, or 99%) sequence identity thereto. In some embodiments, the AAV capsid polypeptide, e.g., the AAV capsid variant, e.g., an AAV capsid variant described herein, comprises an amino acid sequence comprising at least one, two, or three modifications, substitutions (e.g., conservative substitutions), insertions, or deletions, but not more than 30, 20 or 10 modifications, substitutions (e.g., conservative substitutions), insertions, or deletions relative to the amino acid sequence of SEQ ID NO: 3636. In some embodiments, the AAV capsid polypeptide, e.g., the AAV capsid variant, e.g., an AAV capsid variant described herein, comprises an amino acid sequence having at least one, two, or three but no more than 30, 20, or 10 different amino acids relative to the amino acid sequence of SEQ ID NO: 3636.

[1146] In some embodiments, an AAV capsid polypeptide, e.g., an AAV capsid variant, described herein has an increased tropism for a CNS cell or tissue, e.g., a brain cell, brain tissue, spinal cord cell, or spinal cord tissue, relative to the tropism of a reference sequence comprising the amino acid sequence of SEQ ID NO: 138.

[1147] In some embodiments, an AAV capsid polypeptide, e.g., an AAV capsid variant, described herein transduces a brain region, e.g., selected from dentate nucleus, cerebellar cortex, cerebral cortex, brain stem, hippocampus, thalamus and putamen. In some embodiments, the level of transduction of said brain region is at least 5, 10, 50, 100, 200, 500, 1,000, 2,000, 5,000, or 10,000-fold greater as compared to a reference sequence of SEQ ID NO: 138.

[1148] In some embodiments, an AAV capsid polypeptide, e.g., an AAV capsid variant, described herein is enriched at least about 5, 6, 7, 8, 9, or 10-fold, in the brain compared to a reference sequence of SEQ ID NO: 138. In some embodiments, an AAV capsid variant described herein is enriched at least about 20, 30, 40, or 50-fold in the brain compared to a reference sequence of SEQ ID NO: 138. In some embodiments, an AAV capsid variant described herein is enriched at least about 100, 200, 300, or 400-fold in the brain compared to a reference sequence of SEQ ID NO: 138.

[1149] In some embodiments, an AAV capsid polypeptide, e.g., an AAV capsid variant, described herein delivers an increased level of viral genomes to a brain region. In some embodiments, the level of viral genomes is increased by at least 5, 10, 20, 30, 40 or 50-fold, as compared to a reference sequence of SEQ ID NO: 138. In some embodiments, the brain region comprises a frontal cortex, sensory cortex, motor cortex, putamen, thalamus, cerebellar cortex, dentate nucleus, caudate, and/or hippocampus.

[1150] In some embodiments, an AAV capsid polypeptide, e.g., an AAV capsid variant, described herein delivers an increased level of a payload to a brain region. In some embodiments, the level of the payload is increased by at least 5, 10, 50, 100, 200, 500, 1,000, 2,000, 5,000, or 10,000-fold, as compared to a reference sequence of SEQ ID NO: 138. In some embodiments, the brain region comprises a frontal cortex, sensory cortex, motor cortex, putamen, thalamus, cerebellar cortex, dentate nucleus, caudate, and/or hippocampus.

[1151] In some embodiments, an AAV capsid polypeptide, e.g., an AAV capsid variant, described herein delivers an increased level of a payload to a spinal cord region. In some embodiments, the level of the payload is increased by at least 10, 20, 50, 100, 200, 300, 400, 500, 600, 700, 800 or 900-fold, as compared to a reference sequence of SEQ ID NO: 138. In some embodiments, the spinal cord region comprises a cervical, thoracic, and/or lumbar region.

[1152] In some embodiments, an AAV capsid polypeptide, e.g., an AAV capsid variant, described herein shows preferential transduction in a brain region relative to the transduction in the dorsal root ganglia (DRG).

[1153] In some embodiments, an AAV capsid polypeptide, e.g., an AAV capsid variant, described herein has an increased tropism for a muscle cell or tissue, e.g., a heart cell or tissue, relative to the tropism of a reference sequence comprising the amino acid sequence of SEQ ID NO: 138. In some embodiments, the AAV capsid variant delivers an increased level of a payload to a muscle region. In some embodiments, the payload is increased by at least 10, 15, 20, 30, or 40-fold, as compared to a reference sequence of SEQ ID NO: 138. In some embodiments, the muscle region comprises a heart muscle, quadriceps muscle, and/or a diaphragm muscle region. In some embodiments, the muscle region comprises a heart muscle region, e.g., a heart atrium muscle region or a heart ventricle muscle region.

[1154] In some embodiments, an AAV capsid polypeptide, e.g., an AAV capsid variant described herein results in greater than 1, 2, 5, 10, 20, 30, 40, 50, or 100 reads per sample, e.g., when analyzed by an NGS sequencing assay.

[1155] In some embodiments, an AAV capsid polypeptide, e.g., an AAV capsid variant, of the present disclosure has decreased tropism for the liver. In some embodiments, an AAV capsid variant comprises a modification, e.g., substitution (e.g., conservative substitution), insertion, or deletion, that results in reduced tropism (e.g., de-targeting) and/or activity in the liver. In some embodiments, the reduced tropism in the liver is compared to an otherwise similar capsid that does not comprise the modification, e.g., a wild-type capsid polypeptide. In some embodiments, an AAV capsid variant described comprises a modification, e.g., substitution (e.g., conservative substitution), insertion, or deletion, that results in one or more of the following properties: (1) reduced tropism in the liver; (2) de-targeted expression in the liver; (3) reduced activity in the liver; and/or (4) reduced binding to galactose. In some embodiments, the reduction in any one, or all of properties (1)-(3) is compared to an otherwise similar AAV capsid variant that does not comprise the modification. Exemplary modifications are provided in WO 2018/119330; Pulicherla et al. (2011) Mol. Ther. 19(6): 1070-1078; Adachi et al. (2014) Nature Communications 5(3075), DOI: 10.1038/ncomms4075; and Bell et al. (2012) J. Virol. 86(13): 7326-33; the contents of which are hereby incorporated by reference in their entirety. In some embodiments, the AAV capsid variant comprises a modification e.g., substitution (e.g., conservative substitution), insertion, or deletion, at position N470 (e.g., N470A), D271 (e.g., D271A), N272 (e.g., N297A), Y446 (e.g., Y446A), N498 (e.g., N498Y or N4981), W503 (e.g., W530R or W530A), L620 (e.g., L620F), or a combination thereof, relative to a reference sequence numbered according to SEQ ID NO: 138. In some embodiments, the AAV capsid variant comprises one, two, three, four, five or all of an amino acid other than N at position 470 (e.g., A), an amino acid other than D at position 271 (e.g., A), an amino acid other than N at position 272 (e.g., A), an amino acid other than Y at position 446 (e.g., A), and amino acid other than N at position 498/(e.g., Y or I), and amino acid other than W at position 503 (e.g., R or A), and amino acid other than L at position 620 (e.g., F), relative to a reference sequence numbered according to SEQ ID NO: 138. In some embodiments, the AAV capsid variant comprises a modification e.g., substitution (e.g., conservative substitution), insertion, or deletion, at position N470 (e.g., N470A), D271 (e.g., D271A), N272 (e.g., N297A), Y446 (e.g., Y446A), and W503 (e.g., W530R or W530A), relative to a reference sequence numbered according to SEQ ID NO: 138. In some embodiments, the AAV capsid variant comprises a modification e.g., substitution (e.g., conservative substitution), insertion, or deletion, at N498 (e.g., N498Y) and L620 (e.g., L620F).

[1156] In some embodiments, an AAV capsid variant comprised herein comprises a modification as described in Adachi et al. (2014) Nature Communications 5(3075), DOI: 10.1038/ncomms4075, the contents of which are hereby incorporated by reference in its entirety. Exemplary modifications that alter or do not alter tissue transduction in at least the brain, liver, heart, lung, and/or kidney can be found in Supplementary Data 2 showing the AAV Barcode-Seq data obtained with AAV9-AA-VBCLib of Adachi et al. (supra), the contents of which are hereby incorporated by reference in its entirety.

[1157] In some embodiments, an, AAV capsid polypeptide, e.g., an AAV capsid variant, of the present disclosure is isolated, e.g., recombinant. In some embodiments, a polynucleotide encoding an AAV capsid polypeptide, e.g., an AAV capsid variant, of the present disclosure is isolated, e.g., recombinant.

[1158] The present disclosure refers to structural capsid proteins (including VP1, VP2 and VP3) which are encoded by capsid (Cap) genes. These capsid proteins form an outer protein structural shell (i.e. capsid) of a viral vector such as AAV. VP capsid proteins synthesized from Cap polynucleotides generally include a methionine as the first amino acid in the peptide sequence (Met1), which is associated with the start codon (AUG or ATG) in the corresponding Cap nucleotide sequence. However, it is common for a first-methionine (Met1) residue or generally any first amino acid (AA1) to be cleaved off after or during polypeptide synthesis by protein processing enzymes such as Met-aminopeptidases. This “Met/AA-clipping” process often correlates with a corresponding acetylation of the second amino acid in the polypeptide sequence (e.g., alanine, valine, serine, threonine, etc.). Met-clipping commonly occurs with VP1 and VP3 capsid proteins but can also occur with VP2 capsid proteins.

[1159] Where the Met/AA-clipping is incomplete, a mixture of one or more (one, two or three) VP capsid proteins comprising the viral capsid may be produced, some of which may include a Met1/AA1 amino acid (Met+/AA+) and some of which may lack a Met1/AA1 amino acid as a result of Met/AA-clipping (Met−/AA−). For further discussion regarding Met/AA-clipping in capsid proteins, see Jin, et al. Direct Liquid Chromatography/Mass Spectrometry Analysis for Complete Characterization of Recombinant Adeno-Associated Virus Capsid Proteins. Hum Gene Ther Methods. 2017 Oct. 28(5):255-267; Hwang, et al. N-Terminal Acetylation of Cellular Proteins Creates Specific Degradation Signals. Science. 2010 Feb. 19. 327(5968): 973-977; the contents of which are each incorporated herein by reference in their entirety.

[1160] According to the present disclosure, references to capsid proteins is not limited to either clipped (Met−/AA−) or unclipped (Met+/AA+) and may, in context, refer to independent capsid proteins, viral capsids comprised of a mixture of capsid proteins, and/or polynucleotide sequences (or fragments thereof) which encode, describe, produce or result in capsid proteins of the present disclosure. A direct reference to a “capsid protein” or “capsid polypeptide” (such as VP1, VP2 or VP2) may also comprise VP capsid proteins which include a Met1/AA1 amino acid (Met+/AA+) as well as corresponding VP capsid proteins which lack the Met1/AA1 amino acid as a result of Met/AA-clipping (Met−/AA−).

[1161] Further according to the present disclosure, a reference to a specific “SEQ ID NO:” (whether a protein or nucleic acid) which comprises or encodes, respectively, one or more capsid proteins which include a Met1/AA1 amino acid (Met+/AA+) should be understood to teach the VP capsid proteins which lack the Met1/AA1 amino acid as upon review of the sequence, it is readily apparent any sequence which merely lacks the first listed amino acid (whether or not Met1/AA1).

[1162] As a non-limiting example, reference to a VP1 polypeptide sequence which is 736 amino acids in length and which includes a “Met1” amino acid (Met+) encoded by the AUG/ATG start codon may also be understood to teach a VP1 polypeptide sequence which is 735 amino acids in length and which does not include the “Met1” amino acid (Met−) of the 736 amino acid Met+ sequence. As a second non-limiting example, reference to a VP1 polypeptide sequence which is 736 amino acids in length and which includes an “AA1” amino acid (AA1+) encoded by any NNN initiator codon may also be understood to teach a VP1 polypeptide sequence which is 735 amino acids in length and which does not include the “AA1” amino acid (AA1−) of the 736 amino acid AA1+ sequence.

[1163] References to viral capsids formed from VP capsid proteins (such as reference to specific AAV capsid serotypes), can incorporate VP capsid proteins which include a Met1/AA1 amino acid (Met+/AA1+), corresponding VP capsid proteins which lack the Met1/AA1 amino acid as a result of Met/AA1-clipping (Met−/AA1−), and combinations thereof (Met+/AA1+ and Met−/AA1−).

[1164] As a non-limiting example, an AAV capsid serotype can include VP1 (Met+/AA1+), VP1 (Met−/AA1−), or a combination of VP1 (Met+/AA1+) and VP1 (Met−/AA1−). An AAV capsid serotype can also include VP3 (Met+/AA1+), VP3 (Met−/AA1−), or a combination of VP3 (Met+/AA1+) and VP3 (Met−/AA1−); and can also include similar optional combinations of VP2 (Met+/AA1) and VP2 (Met−/AA1−).

[1165] Also provided herein are polynucleotide sequences encoding any of the AAV capsid variants described above and AAV particles, vectors, and cells comprising the same.

### Viral Genome

[1166] In some aspects, the AAV particle of the present disclosure serves as an expression vector comprising a viral genome which encodes a SOD1 targeting siRNA. In some embodiments, expression vectors are not limited to AAV and may be adenovirus, retrovirus, lentivirus, plasmid, vector, or any variant thereof.

[1167] In some embodiments, an AAV particle, e.g., an AAV particle for the vectorized delivery of a siRNA described herein (e.g., a SOD1 targeting siRNA), comprises a viral genome, e.g., an AAV viral genome (e.g., a vector genome or AAV vector genome). In some embodiments, the viral genome, e.g., the AAV viral genome, further comprises an inverted terminal repeat (ITR) region, an enhancer, a promoter, an intron region, a Kozak sequence, an exon region, a nucleic acid encoding a transgene encoding a payload (e.g., a SOD1 targeting siRNA described herein), a nucleotide sequence encoding a miR binding site, a poly A signal region, or a combination thereof.

[1168] In some embodiments, an AAV particle as described herein comprising an AAV capsid polypeptide, e.g., AAV capsid variant, described herein, may be used for the delivery of a viral genome to a tissue (e.g., CNS, DRG, and/or muscle). In some embodiments, an AAV particle comprising an AAV capsid polypeptide, e.g., an AAV capsid variant, described herein can be used for delivery of a viral genome to a tissue or cell, e.g., CNS, DRG, or muscle cell or tissue. In some embodiments, an AAV particle of the present disclosure is a recombinant AAV particle. In some embodiments, an AAV particle of the present disclosure is an isolated AAV particle.

[1169] The viral genome may encode any payload, such as but not limited to a polypeptide (e.g., a therapeutic polypeptide), an antibody, an enzyme, an RNAi agent and/or components of a gene editing system (e.g., a polynucleotide, e.g., a SOD1 targeting siRNA duplex). In one embodiment, the AAV particles described herein are used to deliver a payload to cells of the CNS, after intravenous delivery. In another embodiment, the AAV particles described herein are used to deliver a payload to cells of the DRG, after intravenous delivery. In some embodiments, the AAV particles described herein are used to deliver a payload to cells of a muscle, e.g., a heart muscle, after intravenous delivery.

[1170] In some embodiments, a viral genome of an AAV particle comprising an AAV capsid polypeptide, e.g., an AAV capsid variant, as described herein, comprises a nucleic acid comprising a transgene encoding a payload (e.g., a SOD1 targeting siRNA duplex). In some embodiments, the viral genome comprises an inverted terminal repeat (ITR) sequence. In some embodiments, the viral genome comprises two ITR sequences, e.g., one at the 5′ end of the viral genome (e.g., 5′ relative to the encoded payload) and one at the 3′ end of the viral genome (e.g., 3′ relative to the encoded payload). In some embodiments, a viral genome of the AAV particles described herein (e.g., comprising an AAV capsid variant described herein) may comprise a regulatory element (e.g., promoter), untranslated regions (UTR), a miR binding site a polyadenylation sequence (polyA), a filler or stuffer sequence, an intron, and/or a linker sequence, e.g., for enhancing transgene expression.

[1171] In some embodiments, the viral genome components are selected and/or engineered for expression of a payload in a target tissue (e.g., a CNS tissue, a muscle tissue (e.g., heart), or DRG).

### Viral Genome Component: Inverted Terminal Repeats (ITRs)

[1172] In some embodiments, the AAV particle described herein (e.g., an AAV particle comprising an AAV capsid polypeptide, e.g., an AAV capsid variant described herein), comprises a viral genome (e.g., a viral genome encoding a SOD1 siRNA described herein), with at least one ITR and a payload region. In one embodiment, the viral genome has two ITRs. These two ITRs flank the payload region at the 5′ and 3′ ends. The ITRs function as origins of replication comprising recognition sites for replication. ITRs comprise sequence regions which can be complementary and symmetrically arranged. ITRs incorporated into viral genomes as described herein may be comprised of naturally occurring polynucleotide sequences or recombinantly derived polynucleotide sequences.

[1173] The ITRs may be derived from the same serotype as the capsid polypeptide, e.g., capsid variant, selected from any of the known serotypes, or a derivative thereof. The ITR may be of a different serotype than the capsid. In one embodiment, the AAV particle has more than one ITR. In a non-limiting example, the AAV particle has a viral genome comprising two ITRs. In one embodiment, the ITRs are of the same serotype as one another. In another embodiment, the ITRs are of different serotypes. Non-limiting examples include zero, one or both of the ITRs having the same serotype as the capsid. In one embodiment both ITRs of the viral genome of the AAV particle are AAV2 ITRs.

[1174] In some embodiments, the ITR sequence (e.g., 5′ ITR sequence) comprises the nucleotide sequence of SEQ ID NO: 126. In some embodiments, the ITR sequence (e.g., 5′ ITR sequence) comprises a nucleotide sequence having at least 90% identity, at least 95% identity, at least 98% identity, or at least 99% identity to SEQ ID NO: 126. In some embodiments, the ITR sequence (e.g., 5′ ITR sequence) has a nucleotide sequence with at 1, 2, 3, 4, 5, 6, 7, 8, 9, 10, 1-5, 1-10, 1-20, 10-20, 1-30, 10-30, or 20-30 nucleotide modifications (e.g., substitutions, insertions, and/or deletions) relative to SEQ ID NO: 126.

[1175] In some embodiments, the ITR sequence (e.g., 3′ ITR sequence) comprises the nucleotide sequence of SEQ ID NO: 130. In some embodiments, the ITR sequence (e.g., 3′ ITR sequence) comprises a nucleotide sequence having at least 90% identity, at least 95% identity, at least 98% identity, or at least 99% identity to SEQ ID NO: 130. In some embodiments, the ITR sequence (e.g., 3′ ITR sequence) has a nucleotide sequence with at 1, 2, 3, 4, 5, 6, 7, 8, 9, 10, 1-5, 1-10, 1-20, 10-20, 1-30, 10-30, or 20-30 nucleotide modifications (e.g., substitutions, insertions, and/or deletions) relative to SEQ ID NO: 130.

### Viral Genome Component: Promoters

[1176] In one embodiments, the payload region of the viral genome comprises at least one element to enhance the payload target specificity and expression (See e.g., Powell et al. Viral Expression Cassette Elements to Enhance Transgene Target Specificity and Expression in Gene Therapy, 2015; the contents of which are herein incorporated by reference in their entirety). Non-limiting examples of elements to enhance payload target specificity and expression include promoters, endogenous miRNAs, post-transcriptional regulatory elements (PREs), polyadenylation (PolyA) signal sequences and upstream enhancers (USEs), CMV enhancers and introns.

[1177] In some embodiments, an AAV particle comprising an AAV capsid variant described herein comprises a viral genome comprising a nucleic acid comprising a transgene encoding a payload, wherein the transgene is operably linked to a promoter. In some embodiments, the promoter is a species' specific promoter, an inducible promoter, tissue-specific, or cell cycle-specific (Parr et al., Nat. Med. 3:1145-9 (1997); the contents of which are herein incorporated by reference in their entirety).

[1178] In some embodiments the promoter may be naturally occurring or non-naturally occurring. Non-limiting examples of promoters include those from viruses, plants, mammals, or humans. In some embodiments, the promoters may be those from human cells or systems. In some embodiments, the promoter may be truncated or mutated, e.g., a promoter variant.

[1179] In some embodiments, the promoter is deemed to be efficient when it drives expression of the payload encoded by the viral genome of the AAV particle.

[1180] In some embodiments, the promoter is a promoter deemed to be efficient when it drives expression in a cell being targeted.

[1181] In some embodiments, the promoter is a promoter having a tropism for a cell being targeted.

[1182] In some embodiments, the promoter drives expression of the payload (e.g., the SOD1 targeting siRNA described herein) for a period of time in targeted tissues. Expression driven by a promoter may be for a period of 1 hour, 2, hours, 3 hours, 4 hours, 5 hours, 6 hours, 7 hours, 8 hours, 9 hours, 10 hours, 11 hours, 12 hours, 13 hours, 14 hours, 15 hours, 16 hours, 17 hours, 18 hours, 19 hours, 20 hours, 21 hours, 22 hours, 23 hours, 1 day, 2 days, 3 days, 4 days, 5 days, 6 days, 1 week, 8 days, 9 days, 10 days, 11 days, 12 days, 13 days, 2 weeks, 15 days, 16 days, 17 days, 18 days, 19 days, 20 days, 3 weeks, 22 days, 23 days, 24 days, 25 days, 26 days, 27 days, 28 days, 29 days, 30 days, 31 days, 1 month, 2 months, 3 months, 4 months, 5 months, 6 months, 7 months, 8 months, 9 months, 10 months, 11 months, 1 year, 13 months, 14 months, 15 months, 16 months, 17 months, 18 months, 19 months, 20 months, 21 months, 22 months, 23 months, 2 years, 3 years, 4 years, 5 years, 6 years, 7 years, 8 years, 9 years, 10 years or more than 10 years. Expression may be for 1-5 hours, 1-12 hours, 1-2 days, 1-5 days, 1-2 weeks, 1-3 weeks, 1-4 weeks, 1-2 months, 1-4 months, 1-6 months, 2-6 months, 3-6 months, 3-9 months, 4-8 months, 6-12 months, 1-2 years, 1-5 years, 2-5 years, 3-6 years, 3-8 years, 4-8 years or 5-10 years. As a non-limiting example, the promoter is a selected for sustained expression of a payload in tissues and/or cells of the central or peripheral nervous system.

[1183] In some embodiments, the promoter is a ubiquitous promoter, e.g., capable of expression in multiple tissues. In some embodiments the promoter is a human elongation factor 1α-subunit (EF1α) promoter or a variant or fragment thereof, the cytomegalovirus (CMV) immediate-early enhancer and/or promoter, the chicken β-actin (CBA) promoter or a variant or fragment thereof and its derivative CAG, β glucuronidase (GUSB) promoter, phosphoglycerate kinase (PGK) promoter, or ubiquitin C (UBC) promoter. In some embodiments, the promoter is a cell or tissue specific promoter, e.g., capable of expression in tissues or cells of the central or peripheral nervous systems, regions within (e.g., frontal cortex), and/or sub-sets of cells therein (e.g., excitatory neurons). In some embodiments, the promoter is a cell-type specific promoter capable of expression a payload in excitatory neurons (e.g., glutamatergic), inhibitory neurons (e.g., GABA-ergic), neurons of the sympathetic or parasympathetic nervous system, sensory neurons, neurons of the dorsal root ganglia, motor neurons, or supportive cells of the nervous systems such as microglia, astrocytes, oligodendrocytes, and/or Schwann cells.

[1184] In some embodiments, the promoter is a liver promoter (e.g., hAAT, TBG), skeletal muscle specific promoter (e.g., desmin, MCK, C512), B cell promoter, monocyte promoter, leukocyte promoter, macrophage promoter, pancreatic acinar cell promoter, endothelial cell promoter, lung tissue promoter, and/or cardiac or cardiovascular promoter (e.g., αMHC, cTnT, and CMV-MLC2k).

[1185] In some embodiments, the promoter is a tissue-specific promoter for payload expression in a cell or tissue of the central nervous system. In some embodiments, the promoter is synapsin (Syn) promoter or a variant or fragment thereof, glutamate vesicular transporter (VGLUT) promoter, vesicular GABA transporter (VGAT) promoter, parvalbumin (PV) promoter, sodium channel Naᵥ 1.8 promoter, tyrosine hydroxylase (TH) promoter, choline acetyltransferase (ChaT) promoter, methyl-CpG binding protein 2 (MeCP2) promoter, Ca²⁺/calmodulin-dependent protein kinase II (CaMKII) promoter, metabotropic glutamate receptor 2 (mGluR2) promoter, neurofilament light (NFL) or heavy (NFH) promoter, neuron-specific enolase (NSE) promoter, β-globin minigene nβ2 promoter, preproenkephalin (PPE) promoter, enkephalin (Enk) promoter, and excitatory amino acid transporter 2 (EAAT2) promoter. In some embodiments, the promoter is a cell-type specific promoter capable of expression in an astrocyte, e.g., a glial fibrillary acidic protein (GFAP) promoter and a EAAT2 promoter. In some embodiments, the promoter is a cell-type specific promoter capable of expression in an oligodendrocyte, e.g., a myelin basic protein (MBP) promoter.

[1186] In some embodiments, the promoter is a GFAP promoter. In some embodiments, the promoter is a synapsin (syn or syn1) promoter, or a fragment thereof.

[1187] In some embodiments, the promoter comprises an insulin promoter or a fragment thereof.

[1188] In certain embodiments, the promoter is a variant or fragment of any of the promoters described herein.

[1189] In some embodiments, the promoter of the viral genome described herein (e.g., comprised within an AAV particle comprising an AAV capsid variant described herein) comprises an EF-1α promoter or a fragment or variant thereof, a chicken beta-actin (CBA) promoter or a fragment or variant thereof, a PGK promoter or a fragment or variant thereof, an insulin promoter or a fragment or variant thereof, a synapsin (SYN) promoter or a fragment or variant thereof, e.g., as provided in Table 7. In some embodiments, the promoter comprises the nucleotide sequence of any one of SEQ ID NOs: 4000-4026, a nucleotide sequence comprising at least one, two, or three but no more than four modifications (e.g., substitutions, insertions, and/or deletions) relative to the nucleotide sequence of SEQ ID NOs: 4000-4026, or a nucleotide sequence with at least 70% (e.g., 80, 85%, 90%, 95%, 96%, 97%, 98%, or 99%) sequence identity to any one of SEQ ID NOs: 4000-4026.

TABLE 7
Exemplary Promoter Sequences and Variants

| | | SEQ |
|---|---|---|
| | | ID |
| Description | Sequence | NO: |
| EF1a | CGTGAGGCTCCGGTGCCCGTCAGTGGGCAGAGCGCACATCGCCCACAGTCCCCGAGA | 4000 |
| Promoter | AGTTGGGGGGAGGGGTCGGCAATTGAACCGGTGCCTAGAGAAGGTGGCGCGGGGTAA | |
| (intron | ACTGGGAAAGTGATGTCGTGTACTGGCTCCGCCTTTTTCCCGAGGGTGGGGGAGAAC | |
| underlined) | CGTATATAAGTGCAGTAGTCGCCGTGAACGTTCTTTTTCGCAACGGGTTTGCCGCCA | |
| | GAACACAGGTAAGTGCCGTGTGTGGTTCCCGCGGGCCTGGCCTCTTTACGGGTTATG | |
| | GCCCTTGCGTGCCTTGAATTACTTCCACCTGGCTGCAGTACGTGATTCTTGATCCCG | |
| | AGCTTCGGGTTGGAAGTGGGTGGGAGAGTTCGAGGCCTTGCGCTTAAGGAGCCCCTT | |
| | CGCCTCGTGCTTGAGTTGAGGCCTGGCCTGGGCGCTGGGGCCGCCGCGTGCGAATCT | |
| | GGTGGCACCTTCGCGCCTGTCTCGCTGCTTTCGATAAGTCTCTAGCCATTTAAAATT | |
| | TTTGATGACCTGCTGCGACGCTTTTTTTCTGGCAAGATAGTCTTGTAAATGCGGGCC | |
| | AAGATCTGCACACTGGTATTTCGGTTTTTGGGGCCGCGGGCGGCGACGGGGCCCGTG | |
| | CGTCCCAGCGCACATGTTCGGCGAGGCGGGGCCTGCGAGCGCGGCCACCGAGAATCG | |
| | GACGGGGGTAGTCTCAAGCTGGCCGGCCTGCTCTGGTGCCTGGCCTCGCGCCGCCGT | |
| | GTATCGCCCCGCCCTGGGCGGCAAGGCTGGCCCGGTCGGCACCAGTTGCGTGAGCGG | |
| | AAAGATGGCCGCTTCCCGGCCCTGCTGCAGGGAGCTCAAAATGGAGGACGCGGCGCT | |
| | CGGGAGAGCGGGCGGGTGAGTCACCCACACAAAGGAAAAGGGCCTTTCCGTCCTCAG | |
| | CCGTCGCTTCATGTGACTCCACGGAGTACCGGGCGCCGTCCAGGCACCTCGATTAGT | |
| | TCTCGAGCTTTTGGAGTACGTCGTCTTTAGGTTGGGGGGAGGGGTTTTATGCGATGG | |
| | AGTTTCCCCACACTGAGTGGGTGGAGACTGAAGTTAGGCCAGCTTGGCACTTGATGT | |
| | AATTCTCCTTGGAATTTGCCCTTTTTGAGTTTGGATCTTGGTTCATTCTCAAGCCTC | |
| | AGACAGTGGTTCAAAGTTTTTTTCTTCCATTTCAGGTGTCGTGA | |
| miniEF1a | GCCCGTCAGTGGGCAGAGCGCACATCGCCCACAGTCCCCGAGAAGTTGGGGGGAGGG | 4001 |
| | GTCGGCAATTGAACCGGTGCCTAGAGAAGGTGGCGCGGGGTAAACTGGGAAAGTGAT | |
| | GTCGTGTACTGGCTCCGCCTTTTTCCCGAGGGTGGGGGAGAACCGTATATAAGTGCA | |
| | GTAGTCGCCGTGAACGTTCTTTTTCGCAACGGGTTTGCCGCCAGAACACGCGTAAG | |
| Promoter | GCATG | |
| Variant 1 | | |
| Promoter | GGTGGAGAAGAGCATG | 4003 |
| Variant 2 | | |
| Promoter | GTCATCACTGAGGTGGAGAAGAGCATG | 4004 |
| Variant 3 | | |
| Promoter | CGTGAG | |
| Variant 4 | | |
| Promoter | GT | |
| Variant 5 | | |
| Promoter | GCTCCGGT | |
| Variant 6 | | |
| Promoter | GCCCGTCAGTGGGCAGAGCGCACATCGCCCACAGTCCCCGAGAAGTTGGGGGGAGGG | 4008 |
| Variant 19 | GTCGGCAATTGAACCGGTGCCTAGAGAAGGTGGCGCGGGGTAAACTGGGAAAGTGAT | |
| | GTCGTGTACTGGCTCCGCCTTTTTCCCGAGGGTGGGGGAGAACCGTATATAAGTGCA | |
| | GTAGTCGCCGTGAACGTTCTTTTTCGCAACGGGTTTGCCGCCAGAACACAG | |
| Promoter | GCCCGTCAGTGGGCAGAGCGCACATCGCCCACAGTCCCCGAGAAGTTGGGGGGAGGG | 4009 |
| Variant 20 | GTCGGCAATTGAACCGGTGCCTAGAGAAGGTGGCGCGGGGTAAACTGGGAAAGTGAT | |
| | GTCGTGTACTGGCTCCGCCTTTTTCCCGAGGGTGGGGGAGAACCGTATATAAGTGCA | |
| | GTAGTCGCCGTGAACGTTCTTTTTCGCAACGGGTTTGCCGCCAGAACACGC | |
| Promoter | GTAAG | |
| Variant 7 | | |
| Promoter | GTGCCCGTCAGTGGGCAGAGCGCACATCGCCCACAGTCCCCGAGAAGTTGGGGGGAG | 4011 |
| Variant 8 | GGGTCGGCAATTGAACCGGTGCCTAGAGAAGGTGGCGCGGGGTAAACTGGGAAAGTG | |
| | ATGTCGTGTACTGGCTCCGCCTTTTTCCCGAGGGTGGGGGAGAACCGTATATAAGTG | |
| | CAGTAGTCGCCGTGAACGTTCTTTTTCGCAACGGGTTTGCCGCCAGAACACGCGTAA | |
| | G | |
| Promoter | GCTCCGGTGCCCGTCAGTGGGCAGAGCGCACATCGCCCACAGTCCCCGAGAAGTTGG | 4012 |
| Variant 9 | GGGGAGGGGTCGGCAATTGAACCGGTGCCTAGAGAAGGTGGCGCGGGGTAAACTGGG | |
| | AAAGTGATGTCGTGTACTGGCTCCGCCTTTTTCCCGAGGGTGGGGGAGAACCGTATA | |
| | TAAGTGCAGTAGTCGCCGTGAACGTTCTTTTTCGCAACGGGTTTGCCGCCAGAACAC | |
| | GCGTAAG | |
| Promoter | CGTGAGGCTCCGGTGCCCGTCAGTGGGCAGAGCGCACATCGCCCACAGTCCCCGAGA | 4013 |
| Variant 10 | AGTTGGGGGGAGGGGTCGGCAATTGAACCGGTGCCTAGAGAAGGTGGCGCGGGGTAA | |
| | ACTGGGAAAGTGATGTCGTGTACTGGCTCCGCCTTTTTCCCGAGGGTGGGGGAGAAC | |
| | CGTATATAAGTGCAGTAGTCGCCGTGAACGTTCTTTTTCGCAACGGGTTTGCCGCCA | |
| | GAACACGCGTAAG | |
| Promoter | CGTGAGGCTCCGGTGCCCGTCAGTGGGCAGAGCGCACATCGCCCACAGTCCCCGAGA | 4014 |
| Variant 11 | AGTTGGGGGGAGGGGTCGGCAATTGAACCGGTGCCTAGAGAAGGTGGCGCGGGGTAA | |
| | ACTGGGAAAGTGATGTCGTGTACTGGCTCCGCCTTTTTCCCGAGGGTGGGGGAGAAC | |
| | CGTATATAAGTGCAGTAGTCGCCGTGAACGTTCTTTTTCGCAACGGGTTTGCCGCCA | |
| | GAACACAG | |
| Promoter | GCATGCGTGAGGCTCCGGTGCCCGTCAGTGGGCAGAGCGCACATCGCCCACAGTCCC | 4015 |
| Variant 12 | CGAGAAGTTGGGGGGAGGGGTCGGCAATTGAACCGGTGCCTAGAGAAGGTGGCGCGG | |
| | GGTAAACTGGGAAAGTGATGTCGTGTACTGGCTCCGCCTTTTTCCCGAGGGTGGGGG | |
| | AGAACCGTATATAAGTGCAGTAGTCGCCGTGAACGTTCTTTTTCGCAACGGGTTTGC | |
| | CGCCAGAACACGCGTAAG | |
| Promoter | GCATGCGTGAGGCTCCGGTGCCCGTCAGTGGGCAGAGCGCACATCGCCCACAGTCCC | 4016 |
| Variant 13 | CGAGAAGTTGGGGGGAGGGGTCGGCAATTGAACCGGTGCCTAGAGAAGGTGGCGCGG | |
| | GGTAAACTGGGAAAGTGATGTCGTGTACTGGCTCCGCCTTTTTCCCGAGGGTGGGGG | |
| | AGAACCGTATATAAGTGCAGTAGTCGCCGTGAACGTTCTTTTTCGCAACGGGTTTGC | |
| | CGCCAGAACACAG | |
| Promoter | GGTGGAGAAGAGCATGCGTGAGGCTCCGGTGCCCGTCAGTGGGCAGAGCGCACATCG | 4017 |
| Variant 14 | CCCACAGTCCCCGAGAAGTTGGGGGGAGGGGTCGGCAATTGAACCGGTGCCTAGAGA | |
| | AGGTGGCGCGGGGTAAACTGGGAAAGTGATGTCGTGTACTGGCTCCGCCTTTTTCCC | |
| | GAGGGTGGGGGAGAACCGTATATAAGTGCAGTAGTCGCCGTGAACGTTCTTTTTCGC | |
| | AACGGGTTTGCCGCCAGAACACGCGTAAG | |
| Promoter | GGTGGAGAAGAGCATGCGTGAGGCTCCGGTGCCCGTCAGTGGGCAGAGCGCACATCG | 4018 |
| Variant 15 | CCCACAGTCCCCGAGAAGTTGGGGGGAGGGGTCGGCAATTGAACCGGTGCCTAGAGA | |
| | AGGTGGCGCGGGGTAAACTGGGAAAGTGATGTCGTGTACTGGCTCCGCCTTTTTCCC | |
| | GAGGGTGGGGGAGAACCGTATATAAGTGCAGTAGTCGCCGTGAACGTTCTTTTTCGC | |
| | AACGGGTTTGCCGCCAGAACACAG | |
| Promoter | GTCATCACTGAGGTGGAGAAGAGCATGCGTGAGGCTCCGGTGCCCGTCAGTGGGCAG | 4019 |
| Variant 16 | AGCGCACATCGCCCACAGTCCCCGAGAAGTTGGGGGGAGGGGTCGGCAATTGAACCG | |
| | GTGCCTAGAGAAGGTGGCGCGGGGTAAACTGGGAAAGTGATGTCGTGTACTGGCTCC | |
| | GCCTTTTTCCCGAGGGTGGGGGAGAACCGTATATAAGTGCAGTAGTCGCCGTGAACG | |
| | TTCTTTTTCGCAACGGGTTTGCCGCCAGAACACGCGTAAG | |
| Promoter | GTCATCACTGAGGTGGAGAAGAGCATGCGTGAGGCTCCGGTGCCCGTCAGTGGGCAG | 4020 |
| Variant 18 | AGCGCACATCGCCCACAGTCCCCGAGAAGITGGGGGGAGGGGTCGGCAATTGAACCG | |
| | GTGCCTAGAGAAGGTGGCGCGGGGTAAACTGGGAAAGTGATGTCGTGTACTGGCTCC | |
| | GCCTTTTTCCCGAGGGTGGGGGAGAACCGTATATAAGTGCAGTAGTCGCCGTGAACG | |
| | TTCTTTTTCGCAACGGGTTTGCCGCCAGAACACAG | |
| Chicken | CGACATTGATTATTGACTAGTTATTAATAGTAATCAATTACGGGGTCATTAGTTCAT | 4021 |
| beta- | AGCCCATATATGGAGTTCCGCGTTACATAACTTACGGTAAATGGCCCGCCTGGCTGA | |
| actin (CBA) | CCGCCCAACGACCCCCGCCCATTGACGTCAATAATGACGTATGTTCCCATAGTAACG | |
| promoter | CCAATAGGGACTTTCCATTGACGTCAATGGGTGGAGTATTTACGGTAAACTGCCCAC | |
| | TTGGCAGTACATCAAGTGTATCATATGCCAAGTACGCCCCCTATTGACGTCAATGAC | |
| | GGTAAATGGCCCGCCTGGCATTATGCCCAGTACATGACCTTATGGGACTTTCCTACT | |
| | TGGCAGTACATCTACGTATTAGTCATCGCTATTACCATGTCGAGGCCACGTTCTGCT | |
| | TCACTCTCCCCATCTCCCCCCCCTCCCCACCCCCAATTTTGTATTTATTTATTTTTT | |
| | AATTATTTTGTGCAGCGATGGGGGCGGGGGGGGGGGGCGCGCGCCAGGCGGGGGGGG | |
| | GCGGGGCGAGGGGCGGGGCGGGGCGAGGCGGAGAGGTGCGGCGGCAGCCAATCAGAG | |
| | CGGCGCGCTCCGAAAGTTTCCTTTTATGGCGAGGCGGCGGCGGCGGCGGCCCTATAA | |
| | AAAGCGAAGCGCGCGGCGGGCGGGAGC | |
| Mini-CBA | CCACGTTCTGCTTCACTCTCCCCATCTCCCCCCCCTCCCCACCCCCAATTTTGTATT | 4022 |
| promoter | TATTTATTTTTTAATTATTTTGTGCAGCGATGGGGGCGGGGGGGGGGGGCGCGCGCC | |
| | AGGCGGGGCGGGGCGGGGCGAGGGGCGGGGCGGGGCGAGGCGGAGAGGTGCGGCGGC | |
| | AGCCAATCAGAGCGGCGCGCTCCGAAAGTTTCCTTTTATGGCGAGGCGGCGGCGGCG | |
| | GCGGCCCTATAAAAAGCGAAGCGCGCGGCGGG | |
| PGK promoter | GGGTAGGGGAGGCGCTTTTCCCAAGGCAGTCTGGAGCATGCGCTTTAGCAGCCCCGC | 4023 |
| | TGGGCACTTGGCGCTACACAAGTGGCCTCTGGCCTCGCACACATTCCACATCCACCG | |
| | GTAGGCGCCAACCGGCTCCGTTCTTTGGTGGCCCCTTCGCGCCACCTTCTACTCCTC | |
| | CCCTAGTCAGGAAGTTCCCCCCCGCCCCGCAGCTCGCGTCGTGCAGGACGTGACAAA | |
| | TGGAAGTAGCACGTCTCACTAGTCTCGTGCAGATGGACAGCACCGCTGAGCAATGGA | |
| | AGCGGGTAGGCCTTTGGGGCAGCGGCCAATAGCAGCTTTGCTCCTTCGCTTTCTGGG | |
| | CTCAGAGGCTGGGAAGGGGTGGGTCCGGGGGCGGGCTCAGGGGCGGGCTCAGGGGCG | |
| | GGGCGGGCGCCCGAAGGTCCTCCGGAGGCCCGGCATTCTGCACGCTTCAAAAGCGCA | |
| | CGTCTGCCGCGCTGTTCTCCTCTTCCTCATCTCCGGGCCTTTCG | |
| Insulin | CCCTAATGGGCCAGGCGGCAGGGGTTGAGAGGTAGGGGAGATGGGCTCTGAGACTAT | 4024 |
| promoter | AAAGCCAGCGGGGGCCCAGCAGCCCTC | |
| fragment | | |
| Human | CGCGTGGGGTTATTTCTCTACTTTCGTGTCTCTGAGTGTGCTTCCAGTGCCCCCCTC | 4025 |
| synapsin | CCCCCAAAAAATGCCTTCTGAGTTGAATATCAACACTACAAACCTAGTATCTGCAGA | |
| (SYN) | GGGCCCTGCGTATGAGTGCAAGTGGGTTTTAGGACCAGGATGAGGCGGGGTGGGGGT | |
| promoter | GCCTACCTGACGACCGACCCCGACCCACTGGACAAGCACCCAACCCCCATTCCCCAA | |
| (long) | ATTGCGCATCCCCTATCAGAGAGGGGGAGGGGAAACAGGATGCGGCGAGGCGCGTGC | |
| | GCACTGCCAGCTTCAGCACCGCGGACAGTGCCTTCGCCCCCGCCTGGCGGCGCGCGC | |
| | CACCGCCGCCTCAGCACTGAAGGCGCGCTGACGTCACTCGCCGGTCCCCCGCAAACT | |
| | CCCCTTCCCGGCCACCTTGGTCGCGTCCGCGCCGCCGCCGGCCCAGCCGGACCGCAC | |
| | CACGCGAGGCGCGAGATAGGGGGGCACGGGCGCGACCATCTGCGCTGCGGCGCCGGC | |
| | GACTCAGCGCTGCCTCAGTCTGCGGTGGGCAGCGGAGGAGTCGTGTCGTGCCTGAGA | |
| | GCGCAGCTGTGCTCCTGGGCACCGCGCAGTCCGCCCCCGCGGCTCCTGGCCAGACCA | |
| | CCCCTAGGACCCCCTGCCCCAAGTCGCAGCC | |
| Human SYN | TAGTATCTGCAGAGGGCCCTGCGTATGAGTGCAAGTGGGTTTTAGGACCAGGATGAG | 4026 |
| promoter | GCGGGGTGGGGGTGCCTACCTGACGACCGACCCCGACCCACTGGACAAGCACCCAAC | |
| (short) | CCCCATTCCCCAAATTGCGCATCCCCTATCAGAGAGGGGGAGGGGAAACAGGATGCG | |
| | GCGAGGCGCGTGCGCACTGCCAGCTTCAGCACCGCGGACAGTGCCTTCGCCCCCGCC | |
| | TGGCGGCGCGCGCCACCGCCGCCTCAGCACTGAAGGCGCGCTGACGTCACTCGCCGG | |
| | TCCCCCGCAAACTCCCCTTCCCGGCCACCTTGGTCGCGTCCGCGCCGCCGCCGGCCC | |
| | AGCCGGACCGCACCACGCGAGGCGCGAGATAGGGGGGCACGGGCGCGACCATCTGCG | |
| | CTGCGGCGCCGGCGACTCAGCGCTGCCTCAGTCTGCGGTGGGCAGCGGAGGAGTCGT | |
| | GTCGTGCCTGAGAGCGCAGCTGTGCTCCTGGGCACCGCGCAGTCCGCCCCCGCGGCT | |
| | CCTGGCCAGACCACCCCTAGGACCCCCTGCCCCAAGTCGCAGCC | |

### Viral Genome Component: Untranslated Regions (UTRs)

[1190] In some embodiments, wild type untranslated regions (UTRs) of a gene are transcribed but not translated. Generally, the 5′ UTR starts at the transcription start site and ends at the start codon and the 3′ UTR starts immediately following the stop codon and continues until the termination signal for transcription.

[1191] Features typically found in abundantly expressed genes of specific target organs (e.g., CNS tissue, muscle, or DRG) may be engineered into UTRs to enhance stability and protein production. As a non-limiting example, a 5′ UTR from mRNA normally expressed in the brain (e.g., huntingtin) may be used in the viral genomes of the AAV particles described herein to enhance expression in neuronal cells or other cells of the central nervous system.

[1192] While not wishing to be bound by theory, wild-type 5′ untranslated regions (UTRs) include features which play roles in translation initiation. Kozak sequences, which are commonly known to be involved in the process by which the ribosome initiates translation of many genes, are usually included in 5′ UTRs. Kozak sequences have the consensus CCR(A/G)CCAUGG (SEQ ID NO: 2622), where R is a purine (adenine or guanine) three bases upstream of the start codon (ATG), which is followed by another ‘G’.

[1193] In one embodiment, the 5′UTR in the viral genome includes a Kozak sequence.

[1194] In one embodiment, the 5′UTR in the viral genome does not include a Kozak sequence.

[1195] While not wishing to be bound by theory, wild-type 3′ UTRs are known to have stretches of Adenosines and Uridines embedded therein. These AU rich signatures are particularly prevalent in genes with high rates of turnover. Based on their sequence features and functional properties, the AU rich elements (AREs) can be separated into three classes (Chen et al, 1995, the contents of which are herein incorporated by reference in its entirety): Class I AREs, such as, but not limited to, c-Myc and MyoD, contain several dispersed copies of an AUUUA motif within U-rich regions. Class II AREs, such as, but not limited to, GM-CSF and TNF-α, possess two or more overlapping UUAUUUA(U/A)(U/A) (SEQ ID NO: 2623) nonamers. Class III ARES, such as, but not limited to, c-Jun and Myogenin, are less well defined. These U rich regions do not contain an AUUUA motif. Most proteins binding to the AREs are known to destabilize the messenger, whereas members of the ELAV family, most notably HuR, have been documented to increase the stability of mRNA. HuR binds to AREs of all the three classes. Engineering the HuR specific binding sites into the 3′ UTR of nucleic acid molecules will lead to HuR binding and thus, stabilization of the message in vivo.

[1196] Introduction, removal or modification of 3′ UTR AU rich elements (AREs) can be used to modulate the stability of a polynucleotide. When engineering specific polynucleotides, e.g., payload regions of viral genomes, one or more copies of an ARE can be introduced to make polynucleotides less stable and thereby curtail translation and decrease production of the resultant protein. Likewise, AREs can be identified and removed or mutated to increase the intracellular stability and thus increase translation and production of the resultant protein.

[1197] In some embodiments, the 3′ UTR of the viral genome may include an oligo(dT) sequence for templated addition of a poly-A tail.

[1198] In some embodiments, the viral genome may include at least one miRNA seed, binding site or full sequence. microRNAs (or miRNA or miR) are 19-25 nucleotide noncoding RNAs that bind to the sites of nucleic acid targets and down-regulate gene expression either by reducing nucleic acid molecule stability or by inhibiting translation. In some embodiments, a microRNA sequence comprises a seed region, e.g., a sequence in the region of positions 2-8 of the mature microRNA, which has Watson-Crick sequence fully or partially complementarity to the miRNA target sequence of the nucleic acid.

[1199] In some embodiments, the viral genome may be engineered to include, alter or remove at least one miRNA binding site, full sequence or seed region.

[1200] Any UTR from any gene known in the art may be incorporated into the viral genome of the AAV particle. These UTRs, or portions thereof, may be placed in the same orientation as in the gene from which they were selected or they may be altered in orientation or location. In one embodiment, the UTR used in the viral genome of the AAV particle may be inverted, shortened, lengthened, made with one or more other 5′ UTRs or 3′ UTRs known in the art. As used herein, the term “altered” as it relates to a UTR, means that the UTR has been changed in some way in relation to a reference sequence. For example, a 3′ or 5′ UTR may be altered relative to a wild type or native UTR by the change in orientation or location as taught above or may be altered by the inclusion of additional nucleotides, deletion of nucleotides, swapping or transposition of nucleotides.

[1201] In some embodiments, the viral genome of the AAV particle comprises at least one artificial UTR which is not a variant of a wild type UTR.

[1202] In some embodiments, the viral genome of the AAV particle comprises UTRs which have been selected from a family of transcripts whose proteins share a common function, structure, feature or property.

### Viral Genome Component: Polyadenylation Sequence

[1203] The viral genome encoding a SOD1 siRNA described herein may comprise at least one polyadenylation sequence. In some embodiments, the viral genome of the AAV particle (e.g., an AAV particle comprising an AAV capsid polypeptide, e.g., an AAV capsid variant, described herein) comprises a polyadenylation sequence between the 3′ end of the payload encoding region and the 5′ end of the 3′ITR.

[1204] In some embodiments, the AAV particle comprises a nucleic acid sequence encoding an siRNA molecule may be located upstream of the polyadenylation sequence in an expression vector. Further, the AAV particle comprises a nucleic acid sequence encoding an siRNA molecule may be located downstream of a promoter such as, but not limited to, CMV, U6, CAG, CBA or a CBA promoter with a SV40 intron or a human beta globin intron in an expression vector.

[1205] In some embodiments, the AAV particle comprises a rabbit globin polyadenylation (polyA) signal sequence (rBGpA).

[1206] In some embodiments, the AAV particle comprises a human growth hormone (hGH) polyadenylation (polyA) signal sequence.

[1207] In some embodiments, the polyadenylation signal sequence comprises the nucleotide sequence of SEQ ID NO: 129 or 4027, a nucleotide sequence comprising at least one, two, or three but no more than four modifications (e.g., substitutions, insertions, and/or deletions) relative to the nucleotide sequence of SEQ ID NO: 129 or 4027, or a nucleotide sequence with at least 70% (e.g., 80, 85%, 90%, 95%, 96%, 97%, 98%, or 99%) sequence identity to SEQ ID NO: 129 or 4027.

TABLE 8
Exemplary Poly A sequences

| | | SEQ |
|---|---|---|
| | | ID |
| Description | Sequence | NO: |
| rBGpA polyA | GATCTTTTTCCCTCTGCCAAAAATTATGGGGACATCATGAAGCCCCTTGAGCAT | 129 |
| signal sequence | CTGACTTCTGGCTAATAAAGGAAATTTATTTTCATTGCAATAGTGTGTTGGAAT | |
| | TTTTTGTGTCTCTCACTCG | |
| Human growth | GGGTGGCATCCCTGTGACCCCTCCCCAGTGCCTCTCCTGGCCCTGGAAGTTGCC | 4027 |
| hormone | ACTCCAGTGCCCACCAGCCTTGTCCTAATAAAATTAAGTTGCATCATTTTGTCT | |
| (hGH) polyA | GACTAGGTGTCCTTCTATAATATTATGGGGTGGAGGGGGGTGGTATGGAGCAAG | |
| signal sequence | GGGCAAGTTGGGAAGACAACCTGTAGGGCCTGCGGGGTCTATTGGGAACCAAGC | |
| | TGGAGTGCAGTGGCACAATCTTGGCTCACTGCAATCTCCGCCTCCTGGGTTCAA | |
| | GCGATTCTCCTGCCTCAGCCTCCCGAGTTGTTGGGATTCCAGGCATGCATGACC | |
| | AGGCTCAGCTAATTTTTGTTTTTTTGGTAGAGACGGGGTTTCACCATATTGGCC | |
| | AGGCTGGTCTCCAACTCCTAATCTCAGGTGATCTACCCACCTTGGCCTCCCAAA | |
| | TTGCTGGGATTACAGGCGTGAACCACTGCTCCCTTCCCTGTCCTT | |

### Viral Genome Component: Exons and Introns

[1208] In some embodiments, the viral genome encoding a SOD1 targeting siRNA described herein, comprises at least one element to enhance the payload target specificity and expression (See e.g., Powell et al. Viral Expression Cassette Elements to Enhance Transgene Target Specificity and Expression in Gene Therapy, Discov. Med, 2015, 19(102): 49-57; the contents of which are herein incorporated by reference in their entirety) such as an exon and/or intron. Non-limiting examples of introns include, MVM (67-97 bps), F.IX truncated intron 1 (300 bps), β-globin SD/immunoglobulin heavy chain splice acceptor (250 bps), adenovirus splice donor/immunoglobin splice acceptor (500 bps), SV40 late splice donor/splice acceptor (19S/16S) (180 bps) and hybrid adenovirus splice donor/IgG splice acceptor (230 bps). In one embodiment, the intron is a beta globulin intron.

[1209] In one embodiment, the intron or intron portion may be 100-500 nucleotides in length. The intron may have a length of 80, 90, 100, 110, 120, 130, 140, 150, 160, 170, 171, 172, 173, 174, 175, 176, 177, 178, 179, 180, 190, 200, 210, 220, 230, 240, 250, 260, 270, 280, 290, 300, 310, 320, 330, 340, 350, 360, 370, 380, 390, 400, 410, 420, 430, 440, 450, 460, 470, 480, 490 or 500 nucleotides. The intron may have a length between 80-100, 80-120, 80-140, 80-160, 80-180, 80-200, 80-250, 80-300, 80-350, 80-400, 80-450, 80-500, 200-300, 200-400, 200-500, 300-400, 300-500, or 400-500 nucleotides.

[1210] In some embodiments, the viral genome encoding a SOD1 targeting siRNA described herein comprises an intron comprising the nucleotide sequence of SEQ ID NO: 4044, a nucleotide sequence comprising at least one, two, or three but no more than four modifications (e.g., substitutions, insertions, and/or deletions), relative to the nucleotide sequence of SEQ ID NO: 4044, or a nucleotide sequence with at least 70% (e.g., 80, 85%, 90%, 95%, 96%, 97%, 98%, or 99%) sequence identity to SEQ ID NO: 4044.

[1211] In some embodiments, the intron is positioned 3′ relative to a 5′ITR and/or promoter, and 5′ relative to a nucleotide sequence encoding a modulatory polynucleotide (e.g., a SOD1 targeting RNA agent, e.g., a siRNA duplex), a poly A signal sequence, and/or a 3′ITR.

[1212] In some embodiments, the viral genome encoding a SOD1 targeting siRNA described herein comprises one or more exons (e.g., 1, 2, 3, 4, 5, 6, 7, or 8 or more exons). In some embodiments, the viral genome comprises a first exon, a second exon, or both a first and a second exon. In some embodiments, the exon has a length of about 40, 50, 51, 52, 53, 54, 55, 56, 57, 58, 59, 60, 70, 80, 90, 100, 110, 120, 130, 131, 132, 133, 134, 135, 136, 137, 138, 139, 140, 150, 160, 170, 180, 190, 200, 210, 220, 230, 240, 250, 260, 270, 280, 290, 300, 310, 320, 330, 340, 350, 360, 370, 380, 390, or 400 nucleotides. In some embodiments, the exon has a length of about 40-200, 40-190, 40-180, 40-170, 40-160, 40-150, 40-140, 40-130, 40-120, 40-110, 40-100, 40-90, 40-80, 40-70, 40-60, 80-200, 80-190, 80-180, 80-170, 80-160, 80-150, 80-140, 80-130, 80-120, 80-110, 80-100, 80-90, 120-200, 120-190, 120-180, 120-170, 120-160, 120-150, 120-140, 120-130, 150-200, 150-190, 150-180, 150-170, 150-160, 170-200, 170-190, 170-180, 180-200, 180-190, 190-200, 185-190, 130-140, 130-135, 50-60, or 50-55 nucleotides.

[1213] In some embodiments, the first or second exon comprises the nucleotide sequence of any one of SEQ ID NO: 4045-4048, a nucleotide sequence comprising at least one, two, or three but no more than four modifications, e.g., substitutions, insertions, or deletions, relative to the nucleotide sequence of any one of SEQ ID NO: 4045-4048, or a nucleotide sequence with at least 80% (e.g., 85%, 90%, 95%, 96%, 97%, 98%, or 99%) sequence identity to any one of SEQ ID NO: 4045-4048.

[1214] In some embodiments, the viral genome comprises both a first exon and a second exon, wherein:
[1215] (a) the first exon comprises the nucleotide sequence of SEQ ID NO: 4045 or 4046, a nucleotide sequence comprising at least one, two, or three but no more than four modifications, e.g., substitutions, insertions, or deletions, relative to the nucleotide sequence of SEQ ID NO: 4045 or 4046, or a nucleotide sequence with at least 80% (e.g., 85%, 90%, 95%, 96%, 97%, 98%, or 99%) sequence identity to SEQ ID NO: 4045 or 4046; and
[1216] (b) the second exon comprises the nucleotide sequence of SEQ ID NO: 4047 or 4048, a nucleotide sequence comprising at least one, two, or three but no more than four modifications, e.g., substitutions, insertions, or deletions, relative to the nucleotide sequence of SEQ ID NO: 4047 or 4048, or a nucleotide sequence with at least 80% (e.g., 85%, 90%, 95%, 96%, 97%, 98%, or 99%) sequence identity to SEQ ID NO: 4047 or 4048.

[1217] In some embodiments, one or more or all exons are codon optimized. In some embodiments, one or more or all of the CpG sequences in the one or more or all exons are depleted (e.g., altered to remove CpG sequences, such as by substitution, insertion, or deletion).

[1218] In some embodiments, the viral genome comprises a first exon, an intron (e.g., an intron comprising the sequence of SEQ ID NO: 4044 or a variant thereof), and a second exon (referred to herein as an “exon-intron-exon cassette”).

[1219] In some embodiments, the viral genome comprises a first exon, an intron (e.g., an intron comprising the sequence of SEQ ID NO: 4044 or a variant thereof), and a second exon, wherein the intron is located 3′ relative to the first exon and 5′ relative to the second exon.

[1220] In some embodiments, the exon-intron-exon cassette comprises the nucleotide sequence of SEQ ID NO: 4042 or 4043, a nucleotide sequence comprising at least one, two, or three but no more than four modifications, e.g., substitutions, insertions, or deletions, relative to the nucleotide sequence of SEQ ID NO: 4042 or 4043, or a nucleotide sequence with at least 80% (e.g., 85%, 90%, 95%, 96%, 97%, 98%, or 99%) sequence identity to SEQ ID NO: 4042 or 4043.

[1221] In some embodiments, the exon-intron-exon cassette is positioned 3′ relative to the 5′ITR and/or promoter, and 5′ relative to the nucleotide sequence encoding the modulatory polynucleotide (e.g., a SOD1 targeting RNA agent, e.g., a siRNA duplex), poly A signal sequence, and/or 3′ITR.

[1222] In some embodiments, the nucleotide sequence encoding the modulatory polynucleotide (e.g., a SOD1 targeting RNA agent, e.g., a siRNA duplex) is located within (e.g., inserted into) the intron of the exon-intron-exon cassette.

[1223] In some embodiments, the nucleotide sequence encoding the modulatory polynucleotide (e.g., a SOD1 targeting RNA agent, e.g., a siRNA duplex) replaces all or a portion of the intron in the exon-intron-exon cassette.

TABLE 9
Exemplary exon, intron, and exon-intron-exon cassette sequences

| | | SEQ |
|---|---|---|
| | | ID |
| Description | Sequence | NO: |
| Human beta | TCAGATCGCCTGGAGACGCCATCCACGCTGTTTTGACCTCCATAGAAGACACCG | 4042 |
| globulin (hBG) | GGACCGATCCAGCCTCCGCGGATTCGAATCCCGGCCGGGAACGGTGCATTGGAA | |
| exon-intron- | CGCGGATTCCCCGTGCCAAGAGTGACGTAAGTACCGCCTATAGAGTCTATAGGC | |
| exon cassette | CCACAAAAAATGCTTTCTTCTTTTAATATACTTTTTTGTTTATCTTATTTCTAA | |
| [CpG | TACTTTCCCTAATCTCTTTCTTTCAGGGCAATAATGATACAATGTATCATGCCT | |
| underlined] | CTTTGCACCATTCTAAAGAATAACAGTGATAATTTCTGGGTTAAGGCAATAGCA | |
| | ATATTTCTGCATATAAATATTTCTGCATATAAATTGTAACTGATGTAAGAGGTT | |
| | TCATATTGCTAATAGCAGCTACAATCCAGCTACCATTCTGCTTTTATTTTATGG | |
| | TTGGGATAAGGCTGGATTATTCTGAGTCCAAGCTAGGCCCTTTTGCTAATCATG | |
| | TTCATACCTCTTATCTTCCTCCCACAGCTCCTGGGCAACGTGCTGGTCTGTGTG | |
| | CTGGCCCATCACTTTGGCAAAGAATT | |
| hβG exon- | TCAGATCACCTGGAGACACCATCCACACTGTTTTGACCTCCATAGAAGACACCA | 4043 |
| intron-exon | GGACCAATCCAGCCTCCACAGATTCCAATCCCAGCCAGGAACAGTGCATTGGAA | |
| cassette [CpG | CACAGATTCCCCTTGCCAAGAGTGACGTAAGTACCGCCTATAGAGTCTATAGGC | |
| depleted] | CCACAAAAAATGCTTTCTTCTTTTAATATACTTTTTTGTTTATCTTATTTCTAA | |
| | TACTTTCCCTAATCTCTTTCTTTCAGGGCAATAATGATACAATGTATCATGCCT | |
| | CTTTGCACCATTCTAAAGAATAACAGTGATAATTTCTGGGTTAAGGCAATAGCA | |
| | ATATTTCTGCATATAAATATTTCTGCATATAAATTGTAACTGATGTAAGAGGTT | |
| | TCATATTGCTAATAGCAGCTACAATCCAGCTACCATTCTGCTTTTATTTTATGG | |
| | TTGGGATAAGGCTGGATTATTCTGAGTCCAAGCTAGGCCCTTTTGCTAATCATG | |
| | TTCATACCTCTTATCTTCCTCCCACAGCTCCTGGGCAACCTGCTGGTCTGTGTG | |
| | CTGGCCCATCACTTTGGCAAAGAATT | |
| hβG intron | GTAAGTACCGCCTATAGAGTCTATAGGCCCACAAAAAATGCTTTCTTCTTTTAA | 4044 |
| | TATACTTTTTTGTTTATCTTATTTCTAATACTTTCCCTAATCTCTTTCTTTCAG | |
| | GGCAATAATGATACAATGTATCATGCCTCTTTGCACCATTCTAAAGAATAACAG | |
| | TGATAATTTCTGGGTTAAGGCAATAGCAATATTTCTGCATATAAATATTTCTGC | |
| | ATATAAATTGTAACTGATGTAAGAGGTTTCATATTGCTAATAGCAGCTACAATC | |
| | CAGCTACCATTCTGCTTTTATTTTATGGTTGGGATAAGGCTGGATTATTCTGAG | |
| | TCCAAGCTAGGCCCTTTTGCTAATCATGTTCATACCTCTTATCTTCCTCCCACA | |
| | G | |
| hβG exon (first | TCAGATCGCCTGGAGACGCCATCCACGCTGTTTTGACCTCCATAGAAGACACCG | 4045 |
| exon) [CpG | GGACCGATCCAGCCTCCGCGGATTCGAATCCCGGCCGGGAACGGTGCATTGGAA | |
| underlined] | CGCGGATTCCCCGTGCCAAGAGTGAC | |
| hBG exon (first | TCAGATCACCTGGAGACACCATCCACACTGTTTTGACCTCCATAGAAGACACCA | 4046 |
| exon) [CpG | GGACCAATCCAGCCTCCACAGATTCCAATCCCAGCCAGGAACAGTGCATTGGAA | |
| depleted] | CACAGATTCCCCTTGCCAAGAGTGAC | |
| hβG exon | CTCCTGGGCAACGTGCTGGTCTGTGTGCTGGCCCATCACTTTGGCAAAGAATT | 4047 |
| (second exon) | | |
| [CpG | | |
| underlined] | | |
| hβG exon | CTCCTGGGCAACCTGCTGGTCTGTGTGCTGGCCCATCACTTTGGCAAAGAATT | 4048 |
| (second exon) | | |
| [CpG depleted] | | |

[1224] In some embodiments, the encoded siRNA molecule may be located downstream of a promoter in an expression vector such as, but not limited to, CMV, U6, H1, CBA, CAG, or a CBA promoter with an intron such as SV40 or others known in the art. Further, the encoded siRNA molecule may also be located upstream of the polyadenylation sequence in an expression vector.

[1225] In some embodiments, the nucleotide sequence encoding the siRNA may be located within an intron (e.g., inserted into an intron), or replace all or a portion of an intron sequence.

[1226] In some embodiments, the nucleotide sequence encoding the siRNA may be located within an intron (e.g., inserted into an intron), or replace all or a portion of an intron sequence, of an exon-intron-exon cassette (e.g., the exon-intron-exon cassette of SEQ ID NO: 4042 or 4043).

### Viral Genome Component: Stuffer Sequence

[1227] In some embodiments, the viral genome encoding a SOD1 targeting siRNA described herein, comprises at least one element to improve packaging efficiency and expression, such as a stuffer or filler sequence. Non-limiting examples of a stuffer sequence includes albumin and/or alpha-1 antitrypsin. Any known viral, mammalian, or plant sequence may be manipulated for use as a stuffer sequence.

[1228] In one embodiment, the stuffer or filler sequence may be from about 100-3500 nucleotides in length. The stuffer sequence may have a length of about 100, 200, 300, 400, 500, 600, 700, 800, 900, 1000, 1100, 1200, 1300, 1400, 1500, 1600, 1700, 1800, 1900, 2000, 2100, 2200, 2300, 2400, 2500, 2600, 2700, 2800, 2900 or 3000 nucleotides.

[1229] In certain embodiments, the filler sequence may comprise a region or a portion of a lentivirus.

[1230] In some embodiments, the filler sequence may comprise a region or a portion of the albumin gene. In certain embodiments, the filler sequence may comprise a region or a portion of the human albumin gene (NCBI Reference Sequence: NG_009291.1).

Viral Genome Component: miRNA

[1231] In some embodiments, the viral genome comprises a sequence encoding a miRNA to reduce the expression of the payload in a tissue or cell, e.g., the DRG (dorsal root ganglion), or neurons of other ganglia, such as those of the sympathetic or parasympathetic nervous system. In some embodiments, a miRNA, e.g., a miR183, a miR182, and/or miR96, may be encoded in the viral genome to modulate, e.g., reduce the expression, of the viral genome in a DRG neuron. As another non-limiting example, a miR-122 miRNA may be encoded in the viral genome to modulate, e.g., reduce, the expression of the viral genome in the liver. In some embodiments, a miRNA, e.g., a miR-142-3p, may be encoded in the viral genome to modulate, e.g., reduce, the expression, of the viral genome in a cell or tissue of the hematopoietic lineage, including for example immune cells (e.g., antigen presenting cells or APC, including dendritic cells (DCs), macrophages, and B-lymphocytes). In some embodiments, a miRNA, e.g., a miR-1, may be encoded in the viral genome to modulate, e.g., reduce, the expression, of the viral genome in a cell or tissue of the heart.

### Viral Genome Component: miR Binding Site

[1232] Tissue- or cell-specific expression of the AAV viral particles of the invention can be enhanced by introducing tissue- or cell-specific regulatory sequences, e.g., promoters, enhancers, microRNA binding sites, e.g., a detargeting site. Without wishing to be bound by theory, it is believed that an encoded miR binding site can modulate, e.g., prevent, suppress, or otherwise inhibit, the expression of a gene of interest on the viral genome of the invention, based on the expression of the corresponding endogenous microRNA (miRNA) or a corresponding controlled exogenous miRNA in a tissue or cell, e.g., a non-targeting cell or tissue. In some embodiments, a miR binding site modulates, e.g., reduces, expression of the payload encoded by a viral genome of an AAV particle described herein in a cell or tissue where the corresponding mRNA is expressed. In some embodiments, the miR binding site modulates, e.g., reduces, expression of the encoded siRNA for SOD1 in a cell or tissue of the DRG, liver, hematopoietic lineage, or a combination thereof.

[1233] In some embodiments, the viral genome of an AAV particle described herein comprises a nucleotide sequence encoding a microRNA binding site, e.g., a detargeting site. In some embodiments, the viral genome of an AAV particle described herein comprises a nucleotide sequence encoding a miR binding site, a microRNA binding site series (miR BSs), or a reverse complement thereof.

[1234] In some embodiments, the nucleotide sequence encoding the miR binding site series or the miR binding site is located in the 3′-UTR region of the viral genome (e.g., 3′ relative to the nucleic acid sequence encoding a payload), e.g., before the polyA sequence, 5′-UTR region of the viral genome (e.g., 5′ relative to the nucleic acid sequence encoding a payload), or both.

[1235] In some embodiments, the encoded miR binding site series comprise at least 1-5 copies, e.g., at least 1-3, 2-4, 3-5, 1, 2, 3, 4, 5 or more copies of a miR binding site (miR BS). In some embodiments, the encoded miR binding site series comprises 4 copies of a miR binding site. In some embodiments, all copies are identical, e.g., comprise the same miR binding site. In some embodiments, the miR binding sites within the encoded miR binding site series are continuous and not separated by a spacer. In some embodiments, the miR binding sites within an encoded miR binding site series are separated by a spacer, e.g., a non-coding sequence. In some embodiments, the spacer is about 1 to 6 nucleotides or about 5 to 10 nucleotides, e.g., about 7-8 nucleotides, nucleotides in length. In some embodiments, the spacer is about 8 nucleotides in length. In some embodiments, the spacer sequence comprises one or more of (i) GGAT; (ii) CACGTG; (iii) GCATGC, or a repeat of one or more of (i)-(iii). In some embodiments, the spacer comprises the nucleotide sequence GATAGTTA, or a nucleotide sequence having at least one, two, or three modifications, e.g., substitutions (e.g., conservative substitutions), insertions, or deletions, but no more than four modifications, e.g., substitutions (e.g., conservative substitutions), insertions, or deletions, of GATAGTTA.

[1236] In some embodiments, the encoded miR binding site series comprise at least 1-5 copies, e.g., at least 1-3, 2-4, 3-5, 1, 2, 3, 4, 5 or more copies of a miR binding site (miR BS). In some embodiments, at least 1, 2, 3, 4, 5, or all of the copies are different, e.g., comprise a different miR binding site. In some embodiments, the miR binding sites within the encoded miR binding site series are continuous and not separated by a spacer. In some embodiments, the miR binding sites within an encoded miR binding site series are separated by a spacer, e.g., a non-coding sequence. In some embodiments, the spacer is about 1 to 6 nucleotides or about 5 to 10 nucleotides, e.g., about 7-8 nucleotides or about 8 nucleotides, in length. In some embodiments, the spacer sequence comprises one or more of (i) GGAT; (ii) CACGTG; (iii) GCATGC, or a repeat of one or more of (i)-(iii). In some embodiments, the spacer comprises the nucleotide sequence of GATAGTTA, or a nucleotide sequence having at least one, two, or three modifications, e.g., substitutions (e.g., conservative substitutions), insertions, or deletions, but no more than four modifications, e.g., substitutions (e.g., conservative substitutions), insertions, or deletions, of GATAGTTA.

[1237] In some embodiments, the encoded miR binding site is substantially identical (e.g., at least 70%, 75%, 80%, 85%, 90%, 95%, 99% or 100% identical), to the miR in the host cell. In some embodiments, the encoded miR binding site comprises at least 1, 2, 3, 4, or 5 mismatches or no more than 6, 7, 8, 9, or 10 mismatches to a miR in the host cell. In some embodiments, the mismatched nucleotides are contiguous. In some embodiments, the mismatched nucleotides are non-contiguous. In some embodiments, the mismatched nucleotides occur outside the seed region-binding sequence of the miR binding site, such as at one or both ends of the miR binding site. In some embodiments, the encoded miR binding site is 100% identical to the miR in the host cell.

[1238] In some embodiments, the nucleotide sequence encoding the miR binding site is substantially complimentary (e.g., at least 70%, 75%, 80%, 85%, 90%, 95%, 99% or 100% complementary), to the miR in the host cell. In some embodiments, the sequence complementary to the nucleotide sequence encoding the miR binding site comprises at least 1, 2, 3, 4, or 5 mismatches or no more than 6, 7, 8, 9, or 10 mismatches relative to the corresponding miR in the host cell. In some embodiments, the mismatched nucleotides are contiguous. In some embodiments, the mismatched nucleotides are non-contiguous. In some embodiments, the mismatched nucleotides occur outside the seed region-binding sequence of the miR binding site, such as at one or both ends of the miR binding site. In some embodiments, the encoded miR binding site is 100% complementary to the miR in the host cell.

[1239] In some embodiments, the encoded miR binding site or the encoded miR binding site series is about 10 to about 125 nucleotides in length, e.g., about 10 to 50 nucleotides, 10 to 100 nucleotides, 50 to 100 nucleotides, 50 to 125 nucleotides, or 100 to 125 nucleotides in length. In some embodiments, an encoded miR binding site or the encoded miR binding site series is about 7 to about 28 nucleotides in length, e.g., about 8-28 nucleotides, 7-28 nucleotides, 8-18 nucleotides, 12-28 nucleotides, 20-26 nucleotides, 22 nucleotides, 24 nucleotides, or 26 nucleotides in length, and optionally comprises at least one consecutive region (e.g., 7 or 8 nucleotides) complementary (e.g., full complementary or partially complementary) to the seed sequence of a miRNA (e.g., a miR122, a miR142, a miR-1, a miR183).

[1240] In some embodiments, the encoded miR binding site is complementary (e.g., fully complementary or partially complementary) to a miR expressed in liver or hepatocytes, such as miR122. In some embodiments, the encoded miR binding site or encoded miR binding site series comprises a miR122 binding site sequence. In some embodiments, the encoded miR122 binding site comprises the nucleotide sequence of ACAAACACCATTGTCACACTCCA (SEQ ID NO: 1865), or a nucleotide sequence comprising at least 50%, 55%, 60%, 65%, 70%, 75%, 80%, 85%, 90%, at least 95%, at least 99%, or 100% sequence identity, or having at least one, two, three, four, five, six, or seven modifications, e.g., substitutions (e.g., conservative substitutions), insertions, or deletions, but no more than ten modifications, e.g., substitutions (e.g., conservative substitutions), insertions, or deletions, to SEQ ID NO: 1865, e.g., wherein the modification can result in a mismatch between the encoded miR binding site and the corresponding miRNA. In some embodiments, the viral genome comprises at least 3, 4, or 5 copies of the encoded miR122 binding site, e.g., an encoded miR122 binding site series, optionally wherein the encoded miR122 binding site series comprises the nucleotide sequence of: ACAAACACCATTGTCACACTCCACACAAACACCATTGTCACACTCCACACAAACACCATT GTCACACTCCA (SEQ ID NO: 1866), or a nucleotide sequence comprising at least 50%, 55%, 60%, 65%, 70%, 75%, 80%, 85%, 90%, at least 95%, at least 99%, or 100% sequence identity, or having at least one, two, three, four, five, six, or seven modifications, e.g., substitutions (e.g., conservative substitutions), insertions, or deletions, but no more than ten modifications, e.g., substitutions (e.g., conservative substitutions), insertions, or deletions, to SEQ ID NO: 1866, e.g., wherein the modification can result in a mismatch between the encoded miR binding site and the corresponding miRNA. In some embodiments, at least two of the encoded miR122 binding sites are connected directly, e.g., without a spacer. In other embodiments, at least two of the encoded miR122 binding sites are separated by a spacer, e.g., 1, 2, 3, 4, 5, 6, 7, 8, 9, or 10 nucleotides in length, which is located between two or more consecutive encoded miR122 binding site sequences. In embodiments, the spacer is about 1 to 6 nucleotides or about 5 to 10 nucleotides, e.g., about 7-8 nucleotides or about 8 nucleotides, in length. In some embodiments, the spacer sequence comprises one or more of (i) GGAT; (ii) CACGTG; (iii) GCATGC, or a repeat of one or more of (i)-(iii). In some embodiments, the spacer comprises the nucleotide sequence of GATAGTTA, or a nucleotide sequence comprising at least one, two, or three modifications, e.g., substitutions (e.g., conservative substitutions), insertions, or deletions, but no more than four modifications, e.g., substitutions (e.g., conservative substitutions), insertions, or deletions, of GATAGTTA.

[1241] In some embodiments, the encoded miR binding site is complementary (e.g., fully or partially complementary) to a miR expressed in the heart. In embodiments, the encoded miR binding site or encoded miR binding site series comprises a miR-1 binding site. In some embodiments, the encoded miR-1 binding site comprises the nucleotide sequence of ATACATACTTCTTTACATTCCA (SEQ ID NO: 4679), a nucleotide sequence comprising at least 50%, 55%, 60%, 65%, 70%, 75%, 80%, 85%, 90%, at least 95%, at least 99%, or 100% sequence identity, or having at least one, two, three, four, five, six, or seven modifications e.g., substitutions (e.g., conservative substitutions), insertions, or deletions, but no more than ten modifications, e.g., substitutions (e.g., conservative substitutions), insertions, or deletions, to SEQ ID NO: 4679, e.g., wherein the modification can result in a mismatch between the encoded miR binding site and the corresponding miRNA. In some embodiments, the viral genome comprises at least 2, 3, 4, or 5 copies of the encoded miR-1 binding site, e.g., an encoded miR-1 binding site series. In some embodiments, the at least 2, 3, 4, or 5 copies (e.g., 2 or 3 copies) of the encoded miR-1 binding site are continuous (e.g., not separated by a spacer) or separated by a spacer. In some embodiments, the spacer is about 1 to 6 nucleotides or about 5 to 10 nucleotides, e.g., about 7-8 nucleotides or about 8 nucleotides, in length. In some embodiments, the spacer sequence comprises one or more of (i) GGAT; (ii) CACGTG; (iii) GCATGC, or a repeat of one or more of (i)-(iii). In some embodiments, the spacer comprises the nucleotide sequence of GATAGTTA, or a nucleotide sequence having at least one, two, or three modifications, e.g., substitutions (e.g., conservative substitutions), insertions, or deletions, but no more than four modifications, e.g., substitutions (e.g., conservative substitutions), insertions, or deletions, of GATAGTTA.

[1242] In some embodiments, the encoded miR binding site is complementary (e.g., fully complementary or partially complementary) to a miR expressed in hematopoietic lineage, including immune cells (e.g., antigen presenting cells or APC, including dendritic cells (DCs), macrophages, and B-lymphocytes). In some embodiments, the encoded miR binding site is complementary (e.g., fully complementary or partially complementary) to a miR expressed in hematopoietic lineage comprises a nucleotide sequence disclosed, e.g., in US 2018/0066279, the contents of which are incorporated by reference herein in its entirety.

[1243] In some embodiments, the encoded miR binding site or encoded miR binding site series comprises a miR-142-3p binding site sequence. In some embodiments, the encoded miR-142-3p binding site comprises the nucleotide sequence of TCCATAAAGTAGGAAACACTACA (SEQ ID NO: 1869), a nucleotide sequence comprising at least 50%, 55%, 60%, 65%, 70%, 75%, 80%, 85%, 90%, at least 95%, at least 99%, or 100% sequence identity, or having at least one, two, three, four, five, six, or seven modifications e.g., substitutions (e.g., conservative substitutions), insertions, or deletions, but no more than ten modifications, e.g., substitutions (e.g., conservative substitutions), insertions, or deletions, to SEQ ID NO: 1869, e.g., wherein the modification can result in a mismatch between the encoded miR binding site and the corresponding miRNA. In some embodiments, the viral genome comprises at least 3, 4, or 5 copies of an encoded miR-142-3p binding site, e.g., an encoded miR-142-3p binding site series. In some embodiments, the at least 3, 4, or 5 copies (e.g., 4 copies) of the encoded miR-142-3p binding site are continuous (e.g., not separated by a spacer) or separated by a spacer. In some embodiments, the spacer is about 1 to 6 nucleotides or about 5 to 10 nucleotides, e.g., about 7-8 nucleotides or about 8 nucleotides, in length. In some embodiments, the spacer sequence comprises one or more of (i) GGAT; (ii) CACGTG; (iii) GCATGC, or a repeat of one or more of (i)-(iii). In some embodiments, the spacer comprises the nucleotide sequence of GATAGTTA, or a nucleotide sequence having at least one, two, or three modifications, e.g., substitutions (e.g., conservative substitutions), insertions, or deletions, but no more than four modifications, e.g., substitutions (e.g., conservative substitutions), insertions, or deletions, of GATAGTTA.

[1244] In some embodiments, the encoded miR binding site is complementary (e.g., fully complementary or partially complementary) to a miR expressed in a DRG (dorsal root ganglion) neuron, e.g., a miR183, a miR182, and/or miR96 binding site. In some embodiments, the encoded miR binding site is complementary (e.g., fully complementary or partially complementary) to a miR expressed in expressed in a DRG neuron. In some embodiments, the encoded miR binding site comprises a nucleotide sequence disclosed, e.g., in WO2020/132455, the contents of which are incorporated by reference herein in its entirety.

[1245] In some embodiments, the encoded miR binding site or encoded miR binding site series comprises a miR183 binding site sequence. In some embodiments, the encoded miR183 binding site comprises the nucleotide sequence of AGTGAATTCTACCAGTGCCATA (SEQ ID NO: 1847), or a nucleotide sequence comprising at least 50%, 55%, 60%, 65%, 70%, 75%, 80%, 85%, 90%, at least 95%, at least 99%, or 100% sequence identity, or having at least one, two, three, four, five, six, or seven modifications, e.g., substitutions (e.g., conservative substitutions), insertions, or deletions, but no more than ten modifications, e.g., substitutions (e.g., conservative substitutions), insertions, or deletions, to SEQ ID NO: 1847, e.g., wherein the modification can result in a mismatch between the encoded miR binding site and the corresponding miRNA. In some embodiments, the sequence complementary (e.g., fully complementary or partially complementary) to the seed sequence corresponds to the double underlined of the encoded miR-183 binding site sequence. In some embodiments, the viral genome comprises at least comprises at least 3, 4, or 5 copies (e.g., 4 copies) of the encoded miR183 binding site, e.g. an encoded miR183 binding site. In some embodiments, the viral genome comprises at least comprises 4 copies of the encoded miR183 binding site, e.g. an encoded miR183 binding site comprising 4 copies of a miR183 binding site. In some embodiments, the at least 3, 4, or 5 copies (e.g., 4 copies) of the encoded miR183 binding site are continuous (e.g., not separated by a spacer) or separated by a spacer. In some embodiments, the spacer is about 1 to 6 nucleotides or about 5 to 10 nucleotides, e.g., about 7-8 nucleotides or about 8 nucleotides, in length. In some embodiments, the spacer comprises the nucleotide sequence of GATAGTTA, or a nucleotide sequence having at least one, two, or three modifications, e.g., substitutions (e.g., conservative substitutions), insertions, or deletions, but no more than four modifications, e.g., substitutions (e.g., conservative substitutions), insertions, or deletions, of GATAGTTA. In some embodiments, the spacer sequence comprises one or more of (i) GGAT; (ii) CACGTG; (iii) GCATGC, or a repeat of one or more of (i)-(iii).

[1246] In some embodiments, the encoded miR binding site or encoded miR binding site series comprises a miR182 binding site sequence. In some embodiments, the encoded miR182 binding site comprises, the nucleotide sequence of AGTGTGAGTTCTACCATTGCCAAA (SEQ ID NO: 1867), a nucleotide sequence comprising at least 50%, 55%, 60%, 65%, 70%, 75%, 80%, 85%, 90%, at least 95%, at least 99%, or 100% sequence identity, or having at least one, two, three, four, five, six, or seven modifications, e.g., substitutions (e.g., conservative substitutions), insertions, or deletions, but no more than ten modifications, e.g., substitutions (e.g., conservative substitutions), insertions, or deletions, to SEQ ID NO: 1867, e.g., wherein the modification can result in a mismatch between the encoded miR binding site and the corresponding miRNA. In some embodiments, the viral genome comprises at least 2, 3, 4, or 5 copies of the encoded miR182 binding site, e.g., an encoded miR182 binding site series. In some embodiments, the at least 2, 3, 4, or 5 copies (e.g., 2 or 3 copies) of the encoded miR182 binding site are continuous (e.g., not separated by a spacer) or separated by a spacer. In some embodiments, the spacer is about 1 to 6 nucleotides or about 5 to 10 nucleotides, e.g., about 7-8 nucleotides or about 8 nucleotides, in length. In some embodiments, the spacer comprises the nucleotide sequence of GATAGTTA, or a nucleotide sequence having at least one, two, or three modifications, e.g., substitutions (e.g., conservative substitutions), insertions, or deletions, but no more than four modifications, e.g., substitutions (e.g., conservative substitutions), insertions, or deletions, of GATAGTTA. In some embodiments, the spacer sequence comprises one or more of (i) GGAT; (ii) CACGTG; (iii) GCATGC, or a repeat of one or more of (i)-(iii).

[1247] In some embodiments, the encoded miR binding site or encoded miR binding site series comprises a miR96 binding site sequence. In some embodiments, the encoded miR96 binding site comprises the nucleotide sequence of AGCAAAAATGTGCTAGTGCCAAA (SEQ ID NO: 1868), a sequence comprising at least 50%, 55%, 60%, 65%, 70%, 75%, 80%, 85%, 90%, at least 95%, at least 99%, or 100% sequence identity, or having at least one, two, three, four, five, six, or seven modifications, e.g., substitutions (e.g., conservative substitutions), insertions, or deletions, but no more than ten modifications, e.g., substitutions (e.g., conservative substitutions), insertions, or deletions, to SEQ ID NO: 1868, e.g., wherein the modification can result in a mismatch between the encoded miR binding site and the corresponding miRNA. In some embodiments, the viral genome comprises at least 2, 3, 4, or 5 copies of the encoded miR96 binding site, e.g., an encoded miR96 binding site series. In some embodiments, the at least 2, 3, 4, or 5 copies (e.g., 2 or 3 copies) of the encoded miR96 binding site are continuous (e.g., not separated by a spacer) or separated by a spacer. In some embodiments, the spacer is about 1 to 6 nucleotides or about 5 to 10 nucleotides, e.g., about 7-8 nucleotides or about 8 nucleotides, in length. In some embodiments, the spacer comprises the nucleotide sequence of GATAGTTA, or a nucleotide sequence having at least one, two, or three modifications, e.g., substitutions (e.g., conservative substitutions), insertions, or deletions, but no more than four modifications, e.g., substitutions (e.g., conservative substitutions), insertions, or deletions, of GATAGTTA. In some embodiments, the spacer sequence comprises one or more of (i) GGAT; (ii) CACGTG; (iii) GCATGC, or a repeat of one or more of (i)-(iii).

[1248] In some embodiments, the encoded miR binding site series comprises a miR122 binding site, a miR-1, a miR142 binding site, a miR183 binding site, a miR182 binding site, a miR 96 binding site, or a combination thereof. In some embodiments, the encoded miR binding site series comprises at least 2, 3, 4, or 5 copies of a miR122 binding site, a miR142 binding site, a miR183 binding site, a miR182 binding site, a miR 96 binding site, or a combination thereof. In some embodiments, at least two of the encoded miR binding sites are connected directly, e.g., without a spacer. In other embodiments, at least two of the encoded miR binding sites are separated by a spacer, e.g., 1, 2, 3, 4, 5, 6, 7, 8, 9, or 10 nucleotides in length, which is located between two or more consecutive encoded miR binding site sequences. In embodiments, the spacer is at least about 5 to 10 nucleotides, e.g., about 7-8 nucleotides or about 8 nucleotides, in length. In some embodiments, the spacer coding sequence or reverse complement thereof comprises one or more of (i) GGAT; (ii) CACGTG; (iii) GCATGC, or a repeat of one or more of (i)-(iii). In some embodiments, the spacer comprises the nucleotide sequence of GATAGTTA, or a nucleotide sequence having at least one, two, or three modifications, e.g., substitutions (e.g., conservative substitutions), insertions, or deletions, but no more than four modifications, e.g., substitutions (e.g., conservative substitutions), insertions, or deletions, of GATAGTTA.

[1249] In some embodiments, an encoded miR binding site series comprises at least 2-5 copies (e.g., 2 or 3 copies) of a combination of at least two, three, four, five, or all of a miR-1, miR122 binding site, a miR142 binding site, a miR183 binding site, a miR182 binding site, a miR96 binding site, wherein each of the miR binding sites within the series are continuous (e.g., not separated by a spacer) or are separated by a spacer. In some embodiments, the spacer is about 1 to 6 nucleotides or about 5 to 10 nucleotides, e.g., about 7-8 nucleotides or about 8 nucleotides, in length. In some embodiments, the spacer sequence comprises one or more of (i) GGAT; (ii) CACGTG; (iii) GCATGC, or a repeat of one or more of (i)-(iii). In some embodiments, the spacer comprises the nucleotide sequence of GATAGTTA, or a nucleotide sequence having at least one, two, or three modifications, e.g., substitutions (e.g., conservative substitutions), insertions, or deletions, but no more than four modifications, e.g., substitutions (e.g., conservative substitutions), insertions, or deletions, of GATAGTTA.

[1250] In some embodiments, an encoded miR binding site series comprises at least 2-5 copies (e.g., 2 or 3 copies) of a combination of a miR-122 binding site and a miR-1 binding site, wherein each of the miR binding sites within the series are continuous (e.g., not separated by a spacer) or are separated by a spacer. In some embodiments, the spacer is about 1 to 6 nucleotides or about 5 to 10 nucleotides, e.g., about 7-8 nucleotides or about 8 nucleotides, in length. In some embodiments, the spacer sequence comprises one or more of (i) GGAT; (ii) CACGTG; (iii) GCATGC, or a repeat of one or more of (i)-(iii). In some embodiments, the spacer comprises the nucleotide sequence of GATAGTTA, or a nucleotide sequence having at least one, two, or three modifications, e.g., substitutions (e.g., conservative substitutions), insertions, or deletions, but no more than four modifications, e.g., substitutions (e.g., conservative substitutions), insertions, or deletions, of GATAGTTA.

### Viral Genome Size

[1251] In one embodiment, the AAV particle described herein (e.g., an AAV particle comprising an AAV capsid polypeptide, e.g., an AAV capsid variant), may comprise a single-stranded or double-stranded viral genome. The size of the viral genome may be small, medium, large or the maximum size. As described above, the viral genome may comprise a promoter and a polyA tail.

[1252] In one embodiment, the viral genome may be a small single stranded viral genome. A small single stranded viral genome may be 2.1 to 3.5 kb in size such as, but not limited to, about 2.1, 2.2, 2.3, 2.4, 2.5, 2.6, 2.7, 2.8, 2.9, 3.0, 3.1, 3.2, 3.3, 3.4, and 3.5 kb in size.

[1253] In one embodiment, the viral genome may be a small double stranded viral genome. A small double stranded viral genome may be 1.3 to 1.7 kb in size such as, but not limited to, about 1.3, 1.4, 1.5, 1.6, and 1.7 kb in size.

[1254] In one embodiment, the viral genome may be a medium single stranded viral genome. A medium single stranded viral genome may be 3.6 to 4.3 kb in size such as, but not limited to, about 3.6, 3.7, 3.8, 3.9, 4.0, 4.1, 4.2 and 4.3 kb in size.

[1255] In one embodiment, the viral genome may be a medium double stranded viral genome. A medium double stranded viral genome may be 1.8 to 2.1 kb in size such as, but not limited to, about 1.8, 1.9, 2.0, and 2.1 kb in size.

[1256] In one embodiment, the viral genome may be a large single stranded viral genome. A large single stranded viral genome may be 4.4 to 6.0 kb in size such as, but not limited to, about 4.4, 4.5, 4.6, 4.7, 4.8, 4.9, 5.0, 5.1, 5.2, 5.3, 5.4, 5.5, 5.6, 5.7, 5.8, 5.9 and 6.0 kb in size.

[1257] In one embodiment, the viral genome may be a large double stranded viral genome. A large double stranded viral genome may be 2.2 to 3.0 kb in size such as, but not limited to, about 2.2, 2.3, 2.4, 2.5, 2.6, 2.7, 2.8, 2.9 and 3.0 kb in size.

### Payloads

[1258] In some embodiments, an AAV particle, e.g., an AAV particle for the vectorized delivery of an RNA agent, e.g., a siRNA, e.g., a SOD1 targeting siRNA described herein, comprises a payload. In some embodiments, an AAV particle, e.g., an AAV particle for the vectorized delivery of a siRNA described herein (e.g., a SOD1 targeting siRNA), comprises a viral genome encoding a payload. In some embodiments, the viral genome comprises a promoter operably linked to a nucleic acid comprising a transgene encoding a payload. In some embodiments, the payload comprises a siRNA.

[1259] In some embodiments, the disclosure herein provides constructs that allow for improved expression of a SOD1 targeting siRNA delivered by gene therapy vectors.

[1260] In some embodiments, the disclosure provides constructs that allow for improved biodistribution of a SOD1 targeting siRNA delivered by gene therapy vectors.

[1261] In some embodiments, the disclosure provides constructs that allow for improved sub-cellular distribution or trafficking of a SOD1 targeting siRNA delivered by gene therapy vectors.

[1262] In some embodiments, the disclosure provides constructs that allow for improved trafficking of a SOD1 targeting siRNA to cells in the central nervous system, e.g., the brain and the spinal cord, delivered by gene therapy vectors.

[1263] In some aspects, the present disclosure relates to a composition containing or comprising a nucleic acid sequence encoding a SOD1 targeting siRNA or functional fragment or variants thereof and methods of administering the composition in vitro or in vivo in a subject, e.g., a humans and/or an animal model of disease, e.g., a disease related to expression of SOD1.

[1264] AAV particles of the present disclosure may comprise a nucleic acid sequence encoding at least one “payload.” As used herein, “payload” or “payload region” refers to one or more polynucleotides or polynucleotide regions encoded by or within a viral genome or an expression product of such polynucleotide or polynucleotide region, e.g., a transgene, a polynucleotide encoding a SOD1 targeting polynucleotide (e.g., a SOD1 targeting RNA agent, e.g., a siRNA, e.g., a siRNA duplex for inhibiting expression of SOD1) or fragment or variant thereof. The payload may comprise any nucleic acid known in the art that is useful for the expression (by supplementation of the SOD1 siRNA or gene replacement using a modulatory nucleic acid) of the SOD1 targeting siRNA in a target cell transduced or contacted with the AAV particle carrying the payload.

[1265] The payload construct may comprise a combination of coding and non-coding nucleic acid sequences.

[1266] Any segment, fragment, or the entirety of the viral genome and therein, the payload region, may be codon optimized.

[1267] In some embodiments, the viral genome encodes more than one payload. As a non-limiting example, a viral genome encoding more than one payload may be replicated and packaged into a viral particle. A target cell transduced with a viral particle comprising more than one payload may express each of the payloads in a single cell.

[1268] In some embodiments, the viral genome may encode a coding or non-coding RNA. In certain embodiments, the adeno-associated viral vector particle further comprises at least one cis-element selected from the group consisting of a Kozak sequence, a backbone sequence, and an intron sequence.

[1269] In some embodiments, the payload is a polypeptide which may be a peptide or protein. A protein encoded by the payload construct may comprise a secreted protein, an intracellular protein, an extracellular protein, and/or a membrane protein. The encoded proteins may be structural or functional. Proteins encoded by the viral genome include, but are not limited to, mammalian proteins. In certain embodiments, the AAV particle contains a viral genome that encodes a SOD1 targeting polynucleotide (e.g., a SOD1 targeting RNAi, e.g., a siRNA duplex for inhibiting expression of SOD1), or a fragment or variant thereof. The AAV particles described herein may be useful in the fields of human disease, veterinary applications, and a variety of in vivo and in vitro settings.

[1270] In some embodiments, a payload may comprise polypeptides that serve as marker proteins to assess cell transformation and expression, fusion proteins, polypeptides having a desired biological activity, gene products that can complement a genetic defect, RNA molecules, transcription factors, and other gene products that are of interest in regulation and/or expression. In some embodiments, a payload may comprise nucleotide sequences that provide a desired effect or regulatory function (e.g., transposons, transcription factors).

[1271] The encoded payload may comprise a gene therapy product. A gene therapy product may include, but is not limited to, a polypeptide, RNA molecule, or other gene product that, when expressed in a target cell, provides a desired therapeutic effect. In some embodiments, a gene therapy product may comprise a substitute for a non-functional gene or a gene that is absent, expressed in insufficient amounts, or mutated. In some embodiments, a gene therapy product may comprise a substitute for a non-functional protein or polypeptide or a protein or polypeptide that is absent, expressed in insufficient amounts, misfolded, degraded too rapidly, or mutated. For example, a gene therapy product may comprise a SOD1 siRNA or a polynucleotide encoding a SOD1 siRNA to treat SOD1-related disorders.

[1272] In some embodiments, the payload encodes a messenger RNA (mRNA). As used herein, the term “messenger RNA” (mRNA) refers to any polynucleotide that encodes a polypeptide of interest and that is capable of being translated to produce the encoded polypeptide of interest in vitro, in vivo, in situ, or ex vivo.

[1273] The components of an mRNA include, but are not limited to, a coding region, a 5′-UTR (untranslated region), a 3′-UTR, a 5′-cap and a poly-A tail. In some embodiments, the encoded mRNA or any portion of the AAV genome may be codon optimized.

[1274] A payload construct encoding a payload may comprise or encode a selectable marker. A selectable marker may comprise a gene sequence or a protein or polypeptide encoded by a gene sequence expressed in a host cell that allows for the identification, selection, and/or purification of the host cell from a population of cells that may or may not express the selectable marker. In some embodiments, the selectable marker provides resistance to survive a selection process that would otherwise kill the host cell, such as treatment with an antibiotic. In some embodiments, an antibiotic selectable marker may comprise one or more antibiotic resistance factors, including but not limited to neomycin resistance (e.g., neo), hygromycin resistance, kanamycin resistance, and/or puromycin resistance.

[1275] In some embodiments, a payload construct encoding a payload may comprise a selectable marker including, but not limited to, β-lactamase, luciferase, β-galactosidase, or any other reporter gene as that term is understood in the art, including cell-surface markers, such as CD4 or the truncated nerve growth factor (NGFR) (for GFP, see WO 96/23810; Heim et al., Current Biology 2:178-182 (1996); Heim et al., Proc. Natl. Acad. Sci. USA (1995); or Heim et al., Science 373:663-664 (1995); for β-lactamase, see WO 96/30540); the contents of each of which are herein incorporated by reference in their entirety.

[1276] In some embodiments, a payload construct encoding a selectable marker may comprise a fluorescent protein. A fluorescent protein as herein described may comprise any fluorescent marker including but not limited to green, yellow, and/or red fluorescent protein (GFP, YFP, and/or RFP). In some embodiments, a payload construct encoding a selectable marker may comprise a human influenza hemagglutinin (HA) tag.

[1277] In certain embodiments, a nucleic acid for expression of a payload in a target cell will be incorporated into the viral genome and located between two ITR sequences.

[1278] In some embodiments, a payload construct further comprises a nucleic acid sequence encoding a peptide that binds to the cation-independent mannose 6-phosphate (M6P) receptor (CI-MPR) with high affinity, as described in Int'l Pat. App. Pub. No. WO2019213180A1, the disclosure of which is incorporated herein by reference in its entirety. The peptide that binds CI-MPR can be, e.g., an IGF2 peptide or variant thereof. Binding of CI-MPR can facilitate cellular uptake or delivery and intracellular or sub-cellular targeting of therapeutic proteins provided by gene therapy vectors.

[1279] The payload region may be constructed in such a way as to reflect a region similar to or mirroring the natural organization of an mRNA, e.g., the mRNA encoded by SOD1.

### Modulatory Polynucleotides

[1280] In some embodiments, modulatory polynucleotides, e.g., RNA or DNA molecules, may be used to treat neurodegenerative disease, e.g., amyotrophic lateral sclerosis (ALS). As used herein, a “modulatory polynucleotide” is any nucleic acid sequence(s) which functions to modulate (either increase or decrease) the level or amount of a target gene, e.g., mRNA or protein levels.

[1281] In some embodiments, the modulatory polynucleotide comprises a nucleotide sequence encoding a pri-miRNA, a pre-miRNA, miRNA, or a siRNA. In some embodiments, the pri-miRNA or pre-miRNA is cleaved by cellular enzymes (e.g., Dicer) to produce a miRNA or siRNA. In some embodiments, the modulatory polynucleotide comprises a nucleotide sequence encoding a siRNA within a pri-miRNA or pre-miRNA scaffold sequence. In such cases, cleavage of the pre-miRNA or pri-miRNA by cellular enzymes (e.g., Dicer) produces a siRNA duplex.

[1282] In some embodiments, the modulatory polynucleotides may comprise at least one nucleic acid sequence encoding at least one siRNA molecule. The nucleic acids may, independently if there is more than one, encode 1, 2, 3, 4, 5, 6, 7, 8, 9, or more than 9 siRNA molecules.

[1283] In some embodiments, the molecular scaffold may be a natural pri-miRNA scaffold located downstream of a CMV promoter. As a non-limiting example, the natural pri-miRNA scaffold comprises all or a portion of the human miR155 scaffold. Methods for selection of a molecular scaffold and modulatory polynucleotide are known in the art, including, for example, U.S. Patent Application Publication US20210254103, which is hereby incorporated by reference in its entirety.

[1284] In certain embodiments, the modulatory polynucleotide is designed using at least one of the following properties: loop variant, seed mismatch/bulge/wobble variant, stem mismatch, loop variant and vassal stem mismatch variant, seed mismatch and basal stem mismatch variant, stem mismatch and basal stem mismatch variant, seed wobble and basal stem wobble variant, or a stem sequence variant.

[1285] The present disclosure relates, in part, to RNA interfering (RNAi) induced inhibition of gene expression for treating neurodegenerative disorders. Provided are siRNA duplexes or dsRNA that target SOD1 gene. Such siRNA duplexes or dsRNA can silence SOD1 gene expression in cells, for example, motor neurons, therefore, ameliorating symptoms of ALS such as motor death and muscle atrophy. The SOD1 siRNA may be encoded in polynucleotides of a recombinant AAV genome.

[1286] siRNA duplexes or dsRNA targeting a specific mRNA may be designed and synthesized as part of a target SOD1 targeting polynucleotide in vitro and introduced into cells for activating RNAi process.

siRNA Molecules

[1287] The present disclosure relates to RNA interference (RNAi) induced inhibition of gene expression for treating neurodegenerative disorders. Provided herein are RNA agents, e.g., siRNA duplexes or encoded dsRNA that target the gene of interest (referred to herein collectively as “siRNA molecules”). Such siRNA duplexes or encoded dsRNA can reduce or silence gene expression in cells, such as, but not limited to, medium spiny neurons, cortical neurons and/or astrocytes.

[1288] RNAi (also known as post-transcriptional gene silencing (PTGS), quelling, or co-suppression) is a post-transcriptional gene silencing process in which RNA molecules, in a sequence specific manner, inhibit gene expression, typically by causing the destruction of specific mRNA molecules. The active components of RNAi are short/small double stranded RNAs (dsRNAs), called small interfering RNAs (siRNAs), that typically contain 15-30 nucleotides (e.g., 19 to 25, 19 to 24 or 19-21 nucleotides) and 2 nucleotide 3′ overhangs and that match the nucleic acid sequence of the target gene. These short RNA species may be naturally produced in vivo by Dicer-mediated cleavage of larger dsRNAs and they are functional in mammalian cells.

[1289] Naturally expressed small RNA molecules, named microRNAs (miRNAs), elicit gene silencing by regulating the expression of mRNAs. The miRNAs containing RNA Induced Silencing Complex (RISC) targets mRNAs presenting a perfect sequence complementarity with nucleotides 2-7 in the 5′region of the miRNA which is called the seed region, and other base pairs with its 3′region. miRNA mediated down regulation of gene expression may be caused by cleavage of the target mRNAs, translational inhibition of the target mRNAs, or mRNA decay. miRNA targeting sequences are usually located in the 3′-UTR of the target mRNAs. A single miRNA may target more than 100 transcripts from various genes, and one mRNA may be targeted by different miRNAs.

[1290] siRNA duplexes or dsRNA targeting a specific mRNA may be designed and synthesized in vitro and introduced into cells for activating RNAi processes. Elbashir et al. demonstrated that 21-nucleotide siRNA duplexes (termed small interfering RNAs) were capable of effecting potent and specific gene knockdown without inducing immune response in mammalian cells (Elbashir S M et al., Nature, 2001, 411, 494-498). Since this initial report, post-transcriptional gene silencing by siRNAs quickly emerged as a powerful tool for genetic analysis in mammalian cells and has the potential to produce novel therapeutics.

[1291] The term “double-stranded RNA” or “dsRNA,” as used herein, refers to an RNAi that includes an RNA molecule or complex of molecules having a hybridized duplex region that comprises two anti-parallel and substantially complementary nucleic acid strands, which will be referred to as having “sense” and “antisense” orientations with respect to a target RNA. The duplex region can be of any length that permits specific degradation of a desired target RNA, e.g., through a RISC pathway, but will typically range from 9 to 36 base pairs in length, e.g., 15-30 base pairs in length. Considering a duplex between 9 and 36 base pairs, the duplex can be any length in this range, for example, 9, 10, 11, 12, 13, 14, 15, 16, 17, 18, 19, 20, 21, 22, 23, 24, 25, 26, 27, 28, 29, 30, 31, 32, 33, 34, 35, or 36 and any sub-range therein between, including, but not limited to 15-30 base pairs, 15-25 base pairs, 15-26 base pairs, 15-23 base pairs, 15-22 base pairs, 15-21 base pairs, 15-20 base pairs, 15-19 base pairs, 15-18 base pairs, 15-17 base pairs, 17-22 base pairs, 18-30 base pairs, 18-26 base pairs, 18-23 base pairs, 18-22 base pairs, 18-21 base pairs, 18-20 base pairs, 19-30 base pairs, 19-26 base pairs, 19-23 base pairs, 19-22 base pairs, 19-21 base pairs, 19-20 base pairs, 20-30 base pairs, 20-26 base pairs, 20-25 base pairs, 20-24 base pairs, 20-23 base pairs, 20-22 base pairs, 20-21 base pairs, 21-30 base pairs, 21-26 base pairs, 21-25 base pairs, 21-24 base pairs, 21-23 base pairs, or 21-22 base pairs. One strand of the duplex region of a dsDNA comprises a sequence that is substantially complementary to a region of a target RNA. The two strands forming the duplex structure can be from a single RNA molecule having at least one self-complementary region, or can be formed from two or more separate RNA molecules. Where the duplex region is formed from two strands of a single molecule, the molecule can have a duplex region separated by a single stranded chain of nucleotides (herein referred to as a “hairpin loop”, or “loop”) between the 3′-end of one strand and the 5′-end of the respective other strand forming the duplex structure. The hairpin loop can comprise at least one unpaired nucleotide; in some embodiments the hairpin loop can comprise at least 3, at least 4, at least 5, at least 6, at least 7, at least 8, at least 9, at least 10, at least 20, at least 23 or more unpaired nucleotides. Where the two substantially complementary strands of a dsRNA are comprised by separate RNA molecules, those molecules need not, but can be covalently connected. Where the two strands are connected covalently by means other than a hairpin loop, the connecting structure is referred to as a “linker.” The term “siRNA” is also used herein to refer to a dsRNA as described above.

[1292] In another embodiment, the RNA agent may be a “single-stranded siRNA” that is introduced into a cell or organism to inhibit a target mRNA. Single-stranded RNAi agents bind to the RISC endonuclease Argonaute 2, which then cleaves the target mRNA. The single-stranded siRNAs are generally 15-30 nucleotides and are chemically modified. The design and testing of single-stranded siRNAs are described in U.S. Pat. No. 8,101,348 and in Lima et al., (2012) Cell 150: 883-894, the entire contents of each of which are hereby incorporated herein by reference. Any of the antisense nucleotide sequences described herein (e.g., sequences provided in Table 10) may be used as a single-stranded siRNA as described herein.

[1293] In another aspect, the RNA agent is a “single-stranded antisense RNA molecule”. A single-stranded antisense RNA molecule is complementary to a sequence within the target mRNA. Single-stranded antisense RNA molecules can inhibit translation in a stoichiometric manner by base pairing to the mRNA and physically obstructing the translation machinery, see Dias, N. et al, (2002) Mol Cancer Ther 1:347-355. Alternatively, the single-stranded antisense molecules inhibit a target mRNA by hydridizing to the target and cleaving the target through an RNaseH cleavage event. The single-stranded antisense RNA molecule may be about 10 to about 30 nucleotides in length and have a sequence that is complementary to a target sequence. For example, the single-stranded antisense RNA molecule may comprise a sequence that is at least about 10, 11, 12, 13, 14, 15, 16, 17, 18, 19, 20, or more contiguous nucleotides from any one of the antisense nucleotide sequences described herein, e.g., sequences provided in Table 10.

[1294] RNAi molecules which were designed to target against a nucleic acid sequence that encodes poly-glutamine repeat proteins which cause poly-glutamine expansion diseases such as Huntington's Disease, are described in U.S. Pat. Nos. 9,169,483 and 9,181,544 and International Patent Publication No. WO2015179525, the content of each of which is herein incorporated by reference in their entirety. U.S. Pat. Nos. 9,169,483 and 9,181,544 and International Patent Publication No. WO2015179525 each provide isolated RNA duplexes comprising a first strand of RNA (e.g., 15 contiguous nucleotides) and second strand of RNA (e.g., complementary to at least 12 contiguous nucleotides of the first strand) where the RNA duplex is about 15 to 30 base pairs in length. The first strand of RNA and second strand of RNA may be operably linked by an RNA loop (˜4 to 50 nucleotides) to form a hairpin structure which may be inserted into an expression cassette. Non-limiting examples of loop portions include SEQ ID NO: 9-14 of U.S. Pat. No. 9,169,483, the content of which is herein incorporated by reference in its entirety. Non-limiting examples of strands of RNA which may be used, either full sequence or part of the sequence, to form RNA duplexes include SEQ ID NO: 1-8 of U.S. Pat. No. 9,169,483 and SEQ ID NO: 1-11, 33-59, 208-210, 213-215 and 218-221 of U.S. Pat. No. 9,181,544, the contents of each of which is herein incorporated by reference in its entirety. Non-limiting examples of RNAi molecules include SEQ ID NOs: 1-8 of U.S. Pat. No. 9,169,483, SEQ ID NOs: 1-11, 33-59, 208-210, 213-215 and 218-221 of U.S. Pat. No. 9,181,544 and SEQ ID NOs: 1, 6, 7, and 35-38 of International Patent Publication No. WO2015/179525, the contents of each of which is herein incorporated by reference in their entirety.

[1295] In vitro synthetized siRNA molecules may be introduced into cells in order to activate RNAi. An exogenous siRNA duplex, when it is introduced into cells, similar to the endogenous dsRNAs, can be assembled to form the RNA Induced Silencing Complex (RISC), a multiunit complex that interacts with RNA sequences that are complementary to one of the two strands of the siRNA duplex (i.e., the antisense strand). During the process, the sense strand (or passenger strand) of the siRNA is lost from the complex, while the antisense strand (or guide strand) of the siRNA is matched with its complementary RNA. In particular, the targets of siRNA containing RISC complexes are mRNAs presenting a perfect sequence complementarity. Then, siRNA mediated gene silencing occurs by cleaving, releasing and degrading the target.

[1296] The siRNA duplex comprised of a sense strand homologous to the target mRNA and an antisense strand that is complementary to the target mRNA offers much more advantage in terms of efficiency for target RNA destruction compared to the use of the single strand (ss)-siRNAs (e.g. antisense strand RNA or antisense oligonucleotides). In many cases, it requires higher concentration of the ss-siRNA to achieve the effective gene silencing potency of the corresponding duplex.

[1297] Any of the foregoing molecules may be encoded by a viral genome.

Design and Sequences of siRNA Duplexes Targeting SOD1 Gene

[1298] In some embodiments, the SOD1 targeting polynucleotide is a single-stranded antisense RNAi molecule, a single-stranded siRNA, or a double-stranded RNAi (e.g., a siRNA duplex) that inhibits expression of SOD1. In some embodiments, the SOD1 targeting polynucleotide is a siRNA duplex comprising a sense strand and an antisense strand.

[1299] The present disclosure provides small interfering RNA (siRNA) duplexes (and modulatory polynucleotides encoding them) that target mRNA to interfere with SOD1 gene expression and/or SOD1 protein production.

[1300] As used herein, the term “nucleotide overhang” refers to at least one unpaired nucleotide that protrudes from the duplex structure of an RNAi, e.g., a dsRNA. For example, when a 3′-end of one strand of a dsRNA extends beyond the 5′-end of the other strand, or vice versa, there is a nucleotide overhang. A dsRNA can comprise an overhang of at least one nucleotide; alternatively the overhang can comprise at least two nucleotides, at least three nucleotides, at least four nucleotides, at least five nucleotides or more. A nucleotide overhang can comprise or consist of a nucleotide/nucleoside analog, including a deoxynucleotide/nucleoside. The overhang(s) may be on the sense strand, the antisense strand or any combination thereof. Furthermore, the nucleotide(s) of an overhang can be present on the 5′ end, 3′ end or both ends of either an antisense or sense strand of a dsRNA.

[1301] The encoded siRNA duplex of the present disclosure contains an antisense strand and a sense strand hybridized together forming a duplex structure, wherein the antisense strand is complementary to the nucleic acid sequence of the targeted SOD1 gene, and wherein the sense strand is homologous to the nucleic acid sequence of the targeted SOD1 gene. In some aspects, the 5′end of the antisense strand has a 5′ phosphate group and the 3′end of the sense strand contains a 3′hydroxyl group. In other aspects, there are none, one or 2 nucleotide overhangs at the 3′end of each strand.

[1302] In some embodiments, the SOD1 targeting polynucleotide is a siRNA duplex comprising a sense strand and an antisense strand.

[1303] The siRNAs included herein encompass a dsRNA having an RNA strand (the antisense strand) having a region, e.g., a region that is 30 nucleotides or less, generally 19-24, nucleotides in length, that is substantially complementary (e.g., at least 70%, 75%, 80%, 85%, 90%, 95%, 99% or 100% complementary) to at least part of an mRNA transcript of the SOD1 gene (e.g., a human variant of the SOD1 gene).

[1304] In some embodiments, the antisense sequence of the siRNA (e.g., dsRNA) targets the nucleotides on the SOD1 transcript (e.g., mRNA). In some embodiments, the antisense sequence comprises or consists of a sequence that is fully complementary or substantially complementary (e.g., at least 70%, 75%, 80%, 85%, 90%, 95%, 99% or 100% complementary) to the nucleotides of the SOD1 transcript.

[1305] In some embodiments, the siRNA (e.g., dsRNA) described herein comprises an antisense strand having a region that is substantially complementary (e.g., at least 70%, 75%, 80%, 85%, 90%, 95%, 99% or 100% complementary) to a region of a human SOD1 gene. The siRNA may target any location of the SOD1 mRNA coding sequence, as well as the non-coding regions.

[1306] In embodiments, SOD1 comprises a wild type SOD1 gene, mRNA, and/or protein; a mutated SOD1 gene, mRNA, and/or protein comprising at least one mutation; or a combination thereof.

[1307] In some embodiments, the siRNA (e.g., dsRNA) described herein comprises an antisense strand having a region that is substantially complementary (e.g., at least 70%, 75%, 80%, 85%, 90%, 95%, 99% or 100% complementary) to a region of a mutant SOD1 gene. More than 100 SOD1 mutations have been identified. Most of these mutations produce a single amino acid replacement in the superoxide dismutase enzyme's chain of amino acids. A common mutation, which occurs in 50 percent of American patients with type 1 amyotrophic lateral sclerosis, is the replacement of alanine with valine at position 4 in the amino acid chain (Ala4Val).

[1308] In some embodiments, the region that is substantially complementary may be 30 nucleotides or less (e.g., 29, 28, 27, 26, 25, 24, 23, 22, 21, 20, 19, 18, 17, 16, or 15 nucleotides in length). In some embodiments, the region of complementarity may range from 15, 16, 17, 18, 19, 20, 21, 22, 23, 24, 25, 26, 27, 28, or 29 nucleotides up to 16, 17, 18, 19, 20, 21, 22, 23, 24, 25, 26, 27, 28, 29, or 30 nucleotides in length.

[1309] Some guidelines for designing siRNAs have been proposed in the art. These guidelines generally recommend generating a 19-nucleotide duplexed region, symmetric 2-3 nucleotide 3′overhangs, 5′-phosphate and 3′-hydroxyl groups targeting a region in the gene to be silenced. Other rules that may govern siRNA sequence preference include, but are not limited to, (i) A/U at the 5′ end of the antisense strand; (ii) G/C at the 5′ end of the sense strand; (iii) at least five A/U residues in the 5′ terminal one-third of the antisense strand; and (iv) the absence of any GC stretch of more than 9 nucleotides in length. In accordance with such consideration, together with the specific sequence of a target gene, highly effective siRNA molecules essential for suppressing the SOD1 gene expression may be readily designed.

[1310] According to the present disclosure, siRNA molecules (e.g., siRNA duplexes or encoded dsRNA) that target the SOD1 gene are designed. Such siRNA molecules can specifically, suppress SOD1 gene expression and protein production. In some aspects, the siRNA molecules are designed and used to selectively “knock out” SOD1 gene variants in cells, i.e., mutated SOD1 transcripts that are identified in patients with ALS disease. In some aspects, the siRNA molecules are designed and used to selectively “knock down” SOD1 gene variants in cells. In other aspects, the siRNA molecules are able to inhibit or suppress both the wild type and mutated SOD1 gene.

[1311] In some embodiments, an siRNA molecule of the present disclosure comprises a sense strand and a complementary antisense strand in which both strands are hybridized together to form a duplex structure. The antisense strand has sufficient complementarity to the SOD1 mRNA sequence to direct target-specific RNAi, i.e., the siRNA molecule has a sequence sufficient to trigger the destruction of the target mRNA by the RNAi machinery or process.

[1312] In certain embodiments, an siRNA molecule of the present disclosure comprises a sense strand and a complementary antisense strand in which both strands are hybridized together to form a duplex structure and where the start site of the hybridization to the SOD1 mRNA is between nucleotide 15 and 1000 on the SOD1 mRNA sequence. As a non-limiting example, the start site may be between nucleotide 15-25, 15-50, 15-75, 15-100, 100-150, 150-200, 200-250, 250-300, 300-350, 350-400, 400-450, 450-500, 500-550, 550-600, 600-650, 650-700, 700-70, 750-800, 800-850, 850-900, 900-950, and 950-1000 on the SOD1 mRNA sequence.

[1313] In some embodiments, the antisense strand and target SOD1 mRNA sequences have 100% complementarity. The antisense strand may be complementary to any part of the target SOD1 mRNA sequence. Alternatively, the antisense strand may have 0, 1, 2, or 3 mismatches or no more than 4, 5, or 6 mismatches to the target SOD1 mRNA sequences. In some embodiments, the mismatched nucleotides are contiguous. In some embodiments, the mismatched nucleotides are non-contiguous. In some embodiments, the mismatched nucleotides occur outside the SOD1 target mRNA binding site, such as at one or both ends of the antisense strand. As a non-limiting example, the antisense strand and the SOD1 mRNA sequence have at least 80%, 81%, 82%, 83%, 84%, 85%, 86%, 87%, 88%, 89%, 90%, 91%, 92%, 93%, 94%, 95%, 96%, 97%, 98% or 99% or at least 80-90%, 80-95%, 80-99%, 90-95%, 90-99% or 95-99% complementarity.

[1314] In certain embodiments, an siRNA or dsRNA includes at least two sequences that are complementary to each other. The siRNA or dsRNA may have a sense strand sequence and an antisense strand sequence that are 100% complementary to each other, or alternatively, they may have 1, 2, 3, 4, or more mismatches. These mismatches may be contiguous, or alternatively, they may be non-contiguous throughout the sequence. In some embodiments, the mismatched nucleotides are located at the ends of the sense and antisense sequences. In some embodiments, the mismatched nucleotides of the sense and antisense sequence are on the 5′ end of the sequences, and/or on the 3′ end of the sense and antisense sequences, and/or on both the 5′ and 3′ ends of the sense and antisense sequences.

[1315] According to the present disclosure, the siRNA molecule targeting SOD1 has a length from about 10-50 or more nucleotides, i.e., each strand comprising 10-50 nucleotides (or nucleotide analogs). Preferably, the siRNA molecule has a length from about 15-30, e.g., 15, 16, 17, 18, 19, 20, 21, 22, 23, 24, 25, 26, 27, 28, 29, or 30 nucleotides in each strand, wherein one of the strands is sufficiently complementarity to a target region. In certain embodiments, each strand of the siRNA molecule has a length from about 19 to 25, 19 to 24 or 19 to 21 nucleotides. In some embodiments, each strand of the siRNA molecule has a length ranging from 15, 16, 17, 18, 19, 20, 21, 22, 23, 24, 25, 26, 27, 28, 29, or 30 nucleotides up to 16, 17, 18, 19, 20, 21, 22, 23, 24, 25, 26, 27, 28, 29, 30 or 31 nucleotides. In some embodiments, at least one strand of the siRNA molecule (e.g., the sense strand and/or the antisense strand) is 19, 20, 21, 22, 23, 24, or 25 nucleotides in length.

[1316] In some embodiments, the siRNA molecules of the present disclosure targeting SOD1 can be synthetic RNA duplexes comprising about 19 nucleotides to about 25 nucleotides, and two overhanging nucleotides at the 3′-end. In some aspects, the siRNA molecules may be unmodified RNA molecules. In other aspects, the siRNA molecules may contain at least one modified nucleotide, such as base, sugar or backbone modifications.

[1317] In certain embodiments, the siRNA molecules of the present disclosure targeting SOD1 may comprise a nucleotide sequence such as, but not limited to, the antisense (guide) sequences in Table 10 or a fragment or variant thereof. As a non-limiting example, the antisense sequence used in the siRNA molecule of the present disclosure may comprises at least 15 (e.g., at least 16, 17, 18, 19, 20, 21, 22, or 23) contiguous nucleotides differing by no more than 3 (e.g., by no more than 0, 1 or 2) nucleotides from an antisense sequence listed in any one of the duplexes in Table 10. As a non-limiting example, the antisense sequence used in the siRNA molecule of the present disclosure is at least 80%, 81%, 82%, 83%, 84%, 85%, 86%, 87%, 88%, 89%, 90%, 91%, 92%, 93%, 94%, 95%, 96%, 97%, 98% or 99% or at least 70-80%, 70-90%, 70-95%, 70-99%, 80-90%, 80-95%, 80-99%, 90-95%, 90-99% or 95-99% identical to an antisense nucleotide sequence in Table 10. As another non-limiting example, the antisense sequence used in the siRNA molecule of the present disclosure comprises at least 3, 4, 5, 6, 7, 8, 9, 10, 11, 12, 13, 14, 15, 16, 17, 18, 19, 20, 21 or more than 21 consecutive nucleotides of a nucleotide sequence in Table 10. As yet another non-limiting example, the antisense sequence used in the siRNA molecule of the present disclosure comprises nucleotides 1 to 22, 1 to 21, 1 to 20, 1 to 19, 1 to 18, 1 to 17, 1 to 16, 1 to 15, 1 to 14, 1 to 13, 1 to 12, 1 to 11, 1 to 10, 1 to 9, 1 to 8, 2 to 22, 2 to 21, 2 to 20, 2 to 19, 2 to 18, 2 to 17, 2 to 16, 2 to 15, 2 to 14, 2 to 13, 2 to 12, 2 to 11, 2 to 10, 2 to 9, 2 to 8, 3 to 22, 3 to 21, 3 to 20, 3 to 19, 3 to 18, 3 to 17, 3 to 16, 3 to 15, 3 to 14, 3 to 13, 3 to 12, 3 to 11, 3 to 10, 3 to 9, 3 to 8, 4 to 22, 4 to 21, 4 to 20, 4 to 19, 4 to 18, 4 to 17, 4 to 16, 4 to 15, 4 to 14, 4 to 13, 4 to 12, 4 to 11, 4 to 10, 4 to 9, 4 to 8, 5 to 22, 5 to 21, 5 to 20, 5 to 19, 5 to 18, 5 to 17, 5 to 16, 5 to 15, 5 to 14, 5 to 13, 5 to 12, 5 to 11, 5 to 10, 5 to 9, 5 to 8, 6 to 22, 6 to 21, 6 to 20, 6 to 19, 6 to 18, 6 to 17, 6 to 16, 6 to 15, 6 to 14, 6 to 13, 6 to 12, 6 to 11, 6 to 10, 7 to 22, 7 to 21, 7 to 20, 7 to 19, 7 to 18, 7 to 17, 7 to 16, 7 to 15, 7 to 14, 7 to 13, 7 to 12, 8 to 22, 8 to 21, 8 to 20, 8 to 19, 8 to 18, 8 to 17, 8 to 16, 8 to 15, 8 to 14, 8 to 13, 8 to 12, 9 to 22, 9 to 21, 9 to 20, 9 to 19, 9 to 18, 9 to 17, 9 to 16, 9 to 15, 9 to 14, 10 to 22, 10 to 21, 10 to 20, 10 to 19, 10 to 18, 10 to 17, 10 to 16, 10 to 15, 10 to 14, 11 to 22, 11 to 21, 11 to 20, 11 to 19, 11 to 18, 11 to 17, 11 to 16, 11 to 15, 11 to 14, 12 to 22, 12 to 21, 12 to 20, 12 to 19, 12 to 18, 12 to 17, 12 to 16, 13 to 22, 13 to 21, 13 to 20, 13 to 19, 13 to 18, 13 to 17, 13 to 16, 14 to 22, 14 to 21, 14 to 20, 14 to 19, 14 to 18, 14 to 17, 15 to 22, 15 to 21, 15 to 20, 15 to 19, 15 to 18, 16 to 22, 16 to 21, 16 to 20, 17 to 22, 17 to 21, or 18 to 22 of the antisense strand sequences in Table 10.

[1318] In certain embodiments, the siRNA molecules of the present disclosure targeting SOD1 may comprise a nucleotide sequence such as, but not limited to, the sense (passenger) sequences in Table 10 or a fragment or variant thereof. As a non-limiting example, the sense sequence used in the siRNA molecule of the present disclosure may comprises at least 15 (e.g., at least 16, 17, 18, 19, 20, 21, 22, or 23) contiguous nucleotides differing by no more than 3 (e.g., by no more than 0, 1 or 2) nucleotides from an sense sequence listed in any one of the duplexes in Table 10. As a non-limiting example, the sense sequence used in the siRNA molecule of the present disclosure is at least 80%, 81%, 82%, 83%, 84%, 85%, 86%, 87%, 88%, 89%, 90%, 91%, 92%, 93%, 94%, 95%, 96%, 97%, 98% or 99% or at least 70-80%, 70-90%, 70-95%, 70-99%, 80-90%, 80-95%, 80-99%, 90-95%, 90-99% or 95-99% identical to a sense strand nucleotide sequence in Table 10. As another non-limiting example, the sense sequence used in the siRNA molecule of the present disclosure comprises at least 3, 4, 5, 6, 7, 8, 9, 10, 11, 12, 13, 14, 15, 16, 17, 18, 19, 20, 21 or more than 21 consecutive nucleotides of a nucleotide sequence in Table 10. As yet another non-limiting example, the sense sequence used in the siRNA molecule of the present disclosure comprises nucleotides 1 to 22, 1 to 21, 1 to 20, 1 to 19, 1 to 18, 1 to 17, 1 to 16, 1 to 15, 1 to 14, 1 to 13, 1 to 12, 1 to 11, 1 to 10, 1 to 9, 1 to 8, 2 to 22, 2 to 21, 2 to 20, 2 to 19, 2 to 18, 2 to 17, 2 to 16, 2 to 15, 2 to 14, 2 to 13, 2 to 12, 2 to 11, 2 to 10, 2 to 9, 2 to 8, 3 to 22, 3 to 21, 3 to 20, 3 to 19, 3 to 18, 3 to 17, 3 to 16, 3 to 15, 3 to 14, 3 to 13, 3 to 12, 3 to 11, 3 to 10, 3 to 9, 3 to 8, 4 to 22, 4 to 21, 4 to 20, 4 to 19, 4 to 18, 4 to 17, 4 to 16, 4 to 15, 4 to 14, 4 to 13, 4 to 12, 4 to 11, 4 to 10, 4 to 9, 4 to 8, 5 to 22, 5 to 21, 5 to 20, 5 to 19, 5 to 18, 5 to 17, 5 to 16, 5 to 15, 5 to 14, 5 to 13, 5 to 12, 5 to 11, 5 to 10, 5 to 9, 5 to 8, 6 to 22, 6 to 21, 6 to 20, 6 to 19, 6 to 18, 6 to 17, 6 to 16, 6 to 15, 6 to 14, 6 to 13, 6 to 12, 6 to 11, 6 to 10, 7 to 22, 7 to 21, 7 to 20, 7 to 19, 7 to 18, 7 to 17, 7 to 16, 7 to 15, 7 to 14, 7 to 13, 7 to 12, 8 to 22, 8 to 21, 8 to 20, 8 to 19, 8 to 18, 8 to 17, 8 to 16, 8 to 15, 8 to 14, 8 to 13, 8 to 12, 9 to 22, 9 to 21, 9 to 20, 9 to 19, 9 to 18, 9 to 17, 9 to 16, 9 to 15, 9 to 14, 10 to 22, 10 to 21, 10 to 20, 10 to 19, 10 to 18, 10 to 17, 10 to 16, 10 to 15, 10 to 14, 11 to 22, 11 to 21, 11 to 20, 11 to 19, 11 to 18, 11 to 17, 11 to 16, 11 to 15, 11 to 14, 12 to 22, 12 to 21, 12 to 20, 12 to 19, 12 to 18, 12 to 17, 12 to 16, 13 to 22, 13 to 21, 13 to 20, 13 to 19, 13 to 18, 13 to 17, 13 to 16, 14 to 22, 14 to 21, 14 to 20, 14 to 19, 14 to 18, 14 to 17, 15 to 22, 15 to 21, 15 to 20, 15 to 19, 15 to 18, 16 to 22, 16 to 21, 16 to 20, 17 to 22, 17 to 21, or 18 to 22 of the sense strand sequences in Table 10.

[1319] In certain embodiments, the siRNA molecules of the present disclosure targeting SOD1 may comprise an antisense sequence from, or a fragment or variant thereof. As a non-limiting example, the antisense sequence and the sense sequence have at least region of complementarity ranging from 5, 6, 7, 8, 9, 10, 11, 12, 13, 14, 15, 16, 17, 18, 19, 20, or 21 nucleotides in length, or any region between (e.g., from 17-20 nucleotides in length). In some embodiments, the antisense sequence and the sense sequence are fully complementary. In some embodiments, the antisense sequence and the sense sequence have a region of complementarity ranging from 1-15, 1-16, 1-17, 1-18, 1-19, or 1-20 nucleotides in length.

[1320] In certain embodiments, the siRNA molecules of the present disclosure targeting SOD1 may comprise the sense and antisense siRNA duplex as described in Table 10. As a non-limiting example, these siRNA duplexes may be tested for in vitro inhibitory activity on endogenous SOD1 gene expression.

TABLE 10
Sense and antisense strand sequences of SOD1 dsRNA

| | | | Sense | | | Antisense | |
|---|---|---|---|---|---|---|---|
| | | | Strand | | | Strand | |
| | siRNA | Sense | Sequence | SS | | Sequence | AS |
| | Duplex | Strand | (5′-3′) | SEQ | AS | (5′-3′) | SEQ |
| Name | ID | ID | (Passenger) | ID | ID | (Guide) | ID |
| | D-2741 | 7414 | CGGAGGUCUGG | 2004 | 7415 | UUUAUAGGCCA | 2173 |
| | | | CCUAUAACdTdT | | | GACCUCCGdTdT | |
| | D-2742 | 7416 | GGAGGUCUGGC | 2005 | 7417 | UUUUAUAGGCC | 2174 |
| | | | CUAUAAACdTdT | | | AGACCUCCdTdT | |
| | D-2743 | 7418 | GAGGUCUGGCC | 2006 | 7419 | UCUUUAUAGGC | 2175 |
| | | | UAUAAAGCdTdT | | | CAGACCUCdTdT | |
| | D-2744 | 7420 | AGGUCUGGCCU | 2007 | 7421 | UACUUUAUAGG | 2176 |
| | | | AUAAAGUCdTdT | | | CCAGACCUdTdT | |
| | D-2745 | 7422 | GGUCUGGCCUA | 2008 | 7423 | UUACUUUAUAG | 2177 |
| | | | UAAAGUACdTdT | | | GCCAGACCdTdT | |
| | D-2746 | 7424 | UCUGGCCUAUA | 2009 | 7425 | UACUACUUUAU | 2178 |
| | | | AAGUAGUCdTdT | | | AGGCCAGAdTdT | |
| | D-2747 | 7426 | CUGGCCUAUAA | 2010 | 7427 | UGACUACUUUA | 2179 |
| | | | AGUAGUCCdTdT | | | UAGGCCAGdTdT | |
| | D-2748 | 7428 | UGGCCUAUAAA | 2011 | 7429 | UCGACUACUUU | 2180 |
| | | | GUAGUCGCdTdT | | | AUAGGCCAdTdT | |
| | D-2749 | 7430 | GGCCUAUAAAG | 2012 | 7431 | UGCGACUACUU | 2181 |
| | | | UAGUCGCCdTdT | | | UAUAGGCCdTdT | |
| | D-2750 | 7432 | GCCUAUAAAGU | 2013 | 7433 | UCGCGACUACU | 2182 |
| | | | AGUCGCGCdTdT | | | UUAUAGGCdTdT | |
| | D-2751 | 7434 | CCUAUAAAGUA | 2014 | 7435 | UCCGCGACUAC | 2183 |
| | | | GUCGCGGCdTdT | | | UUUAUAGGdTdT | |
| | D-2752 | 7436 | GUCGUAGUCUC | 2015 | 7437 | UGCUGCAGGAG | 2184 |
| | | | CUGCAGCCdTdT | | | ACUACGACdTdT | |
| | D-2753 | 7438 | CGUAGUCUCCU | 2016 | 7439 | UACGCUGCAGG | 2185 |
| | | | GCAGCGUCdTdT | | | AGACUACGdTdT | |
| | D-2754 | 7440 | GUAGUCUCCUG | 2017 | 7441 | UGACGCUGCAG | 2186 |
| | | | CAGCGUCCdTdT | | | GAGACUACdTdT | |
| | D-2755 | 7442 | UAGUCUCCUGC | 2018 | 7443 | UAGACGCUGCA | 2187 |
| | | | AGCGUCUCdTdT | | | GGAGACUAdTdT | |
| | D-2756 | 7444 | AUGGCGACGAA | 2019 | 7445 | UCACGGCCUUC | 2188 |
| | | | GGCCGUGCdTdT | | | GUCGCCAUdTdT | |
| | D-2757 | 7446 | CGACGAAGGCC | 2020 | 7447 | UCGCACACGGCC | 2189 |
| | | | GUGUGCGCdTdT | | | UUCGUCGdTdT | |
| | D-2758 | 7448 | GAAGGCCGUGU | 2021 | 7449 | UAGCACGCACA | 2190 |
| | | | GCGUGCUCdTdT | | | CGGCCUUCdTdT | |
| | D-2759 | 7450 | GGCCGUGUGCG | 2022 | 7451 | UUUCAGCACGC | 2191 |
| | | | UGCUGAACdTdT | | | ACACGGCCdTdT | |
| | D-2760 | 7452 | AGGGCGACGGC | 2023 | 7453 | UGCACUGGGCC | 2192 |
| | | | CCAGUGCCdTdT | | | GUCGCCCUdTdT | |
| | D-2761 | 7454 | UGCAGGGCAUC | 2024 | 7455 | UAAUUGAUGAU | 2193 |
| | | | AUCAAUUCdTdT | | | GCCCUGCAdTdT | |
| | D-2762 | 7456 | GCAGGGCAUCA | 2025 | 7457 | UAAAUUGAUGA | 2194 |
| | | | UCAAUUUCdTdT | | | UGCCCUGCdTdT | |
| | D-2763 | 7458 | AGGGCAUCAUC | 2026 | 7459 | UCGAAAUUGAU | 2195 |
| | | | AAUUUCGCdTdT | | | GAUGCCCUdTdT | |
| | D-2764 | 7460 | GGGCAUCAUCA | 2027 | 7461 | UUCGAAAUUGA | 2196 |
| | | | AUUUCGACdTdT | | | UGAUGCCCdTdT | |
| | D-2765 | 7462 | GGCAUCAUCAA | 2028 | 7463 | UCUCGAAAUUG | 2197 |
| | | | UUUCGAGCdTdT | | | AUGAUGCCdTdT | |
| | D-2766 | 7464 | GCAUCAUCAAU | 2029 | 7465 | UGCUCGAAAUU | 2198 |
| | | | UUCGAGCCdTdT | | | GAUGAUGCdTdT | |
| | D-2767 | 7466 | CAUCAUCAAUU | 2030 | 7467 | UUGCUCGAAAU | 2199 |
| | | | UCGAGCACdTdT | | | UGAUGAUGdTdT | |
| | D-2768 | 7468 | AAUUUCGAGCA | 2031 | 7469 | UUUCCUUCUGC | 2200 |
| | | | GAAGGAACdTdT | | | UCGAAAUUdTdT | |
| | D-2769 | 7470 | UUCGAGCAGAA | 2032 | 7471 | UACUUUCCUUC | 2201 |
| | | | GGAAAGUCdTdT | | | UGCUCGAAdTdT | |
| | D-2770 | 7472 | UCGAGCAGAAG | 2033 | 7473 | UUACUUUCCUU | 2202 |
| | | | GAAAGUACdTdT | | | CUGCUCGAdTdT | |
| | D-2771 | 7474 | AAGGUGUGGGG | 2034 | 7475 | UAAUGCUUCCC | 2203 |
| | | | AAGCAUUCdTdT | | | CACACCUUdTdT | |
| | D-2772 | 7476 | GGUGUGGGGAA | 2035 | 7477 | UUUAAUGCUUC | 2204 |
| | | | GCAUUAACdTdT | | | CCCACACCdTdT | |
| | D-2773 | 7478 | GACUGACUGAA | 2036 | 7479 | UGCAGGCCUUC | 2205 |
| | | | GGCCUGCCdTdT | | | AGUCAGUCdTdT | |
| | D-2774 | 7480 | CUGACUGAAGG | 2037 | 7481 | UAUGCAGGCCU | 2206 |
| | | | CCUGCAUCdTdT | | | UCAGUCAGdTdT | |
| | D-2775 | 7482 | UGACUGAAGGC | 2038 | 7483 | UCAUGCAGGCC | 2207 |
| | | | CUGCAUGCdTdT | | | UUCAGUCAdTdT | |
| | D-2776 | 7484 | UGAAGGCCUGC | 2039 | 7485 | UAAUCCAUGCA | 2208 |
| | | | AUGGAUUCdTdT | | | GGCCUUCAdTdT | |
| | D-2777 | 7486 | GAAGGCCUGCA | 2040 | 7487 | UGAAUCCAUGC | 2209 |
| | | | UGGAUUCCdTdT | | | AGGCCUUCdTdT | |
| | D-2778 | 7488 | UGCAUGGAUUC | 2041 | 7489 | UGAACAUGGAA | 2210 |
| | | | CAUGUUCCdTdT | | | UCCAUGCAdTdT | |
| | D-2779 | 7490 | CAUGGAUUCCA | 2042 | 7491 | UAUGAACAUGG | 2211 |
| | | | UGUUCAUCdTdT | | | AAUCCAUGdTdT | |
| | D-2780 | 7492 | GGAUUCCAUGU | 2043 | 7493 | UCUCAUGAACA | 2212 |
| | | | UCAUGAGCdTdT | | | UGGAAUCCdTdT | |
| | D-2781 | 7494 | UUCCAUGUUCA | 2044 | 7495 | UAAACUCAUGA | 2213 |
| | | | UGAGUUUCdTdT | | | ACAUGGAAdTdT | |
| | D-2782 | 7496 | GUUCAUGAGUU | 2045 | 7497 | UAUCUCCAAAC | 2214 |
| | | | UGGAGAUCdTdT | | | UCAUGAACdTdT | |
| | D-2783 | 7498 | UUCAUGAGUUU | 2046 | 7499 | UUAUCUCCAAA | 2215 |
| | | | GGAGAUACdTdT | | | CUCAUGAAdTdT | |
| | D-2784 | 7500 | UGAGUUUGGAG | 2047 | 7501 | UGUAUUAUCUC | 2216 |
| | | | AUAAUACCdTdT | | | CAAACUCAdTdT | |
| | D-2785 | 7502 | GAGUUUGGAGA | 2048 | 7503 | UUGUAUUAUCU | 2217 |
| | | | UAAUACACdTdT | | | CCAAACUCdTdT | |
| | D-2786 | 7504 | AGGCUGUACCA | 2049 | 7505 | UCCUGCACUGG | 2218 |
| | | | GUGCAGGCdTdT | | | UACAGCCUdTdT | |
| | D-2787 | 7506 | GGCUGUACCAG | 2050 | 7507 | UACCUGCACUG | 2219 |
| | | | UGCAGGUCdTdT | | | GUACAGCCdTdT | |
| | D-2788 | 7508 | GCAGGUCCUCA | 2051 | 7509 | UAUUAAAGUGA | 2220 |
| | | | CUUUAAUCdTdT | | | GGACCUGCdTdT | |
| | D-2789 | 7510 | CAGGUCCUCAC | 2052 | 7511 | UGAUUAAAGUG | 2221 |
| | | | UUUAAUCCdTdT | | | AGGACCUGdTdT | |
| | D-2790 | 7512 | UCACUUUAAUC | 2053 | 7513 | UGAUAGAGGAU | 2222 |
| | | | CUCUAUCCdTdT | | | UAAAGUGAdTdT | |
| | D-2791 | 7514 | CUAUCCAGAAA | 2054 | 7515 | UACCGUGUUUU | 2223 |
| | | | ACACGGUCdTdT | | | CUGGAUAGdTdT | |
| | D-2792 | 7516 | UAUCCAGAAAA | 2055 | 7517 | UCACCGUGUUU | 2224 |
| | | | CACGGUGCdTdT | | | UCUGGAUAdTdT | |
| | D-2793 | 7518 | AUCCAGAAAAC | 2056 | 7519 | UCCACCGUGUU | 2225 |
| | | | ACGGUGGCdTdT | | | UUCUGGAUdTdT | |
| | D-2794 | 7520 | CCAGAAAACAC | 2057 | 7521 | UGCCCACCGUG | 2226 |
| | | | GGUGGGCCdTdT | | | UUUUCUGGdTdT | |
| | D-2795 | 7522 | GAAAACACGGU | 2058 | 7523 | UUUGGCCCACC | 2227 |
| | | | GGGCCAACdTdT | | | GUGUUUUCdTdT | |
| | D-2796 | 7524 | AAAACACGGUG | 2059 | 7525 | UUUUGGCCCAC | 2228 |
| | | | GGCCAAACdTdT | | | CGUGUUUUdTdT | |
| | D-2797 | 7526 | CGGUGGGCCAA | 2060 | 7527 | UUCAUCCUUUG | 2229 |
| | | | AGGAUGACdTdT | | | GCCCACCGdTdT | |
| | D-2798 | 7528 | AGGAUGAAGAG | 2061 | 7529 | UCAUGCCUCUC | 2230 |
| | | | AGGCAUGCdTdT | | | UUCAUCCUdTdT | |
| | D-2799 | 7530 | AUGAAGAGAGG | 2062 | 7531 | UCAACAUGCCU | 2231 |
| | | | CAUGUUGCdTdT | | | CUCUUCAUdTdT | |
| | D-2800 | 7532 | GAGAGGCAUGU | 2063 | 7533 | UGUCUCCAACA | 2232 |
| | | | UGGAGACCdTdT | | | UGCCUCUCdTdT | |
| | D-2801 | 7534 | AGAGGCAUGUU | 2064 | 7535 | UAGUCUCCAAC | 2233 |
| | | | GGAGACUCdTdT | | | AUGCCUCUdTdT | |
| | D-2802 | 7536 | AUGUUGGAGAC | 2065 | 7537 | UUGCCCAAGUC | 2234 |
| | | | UUGGGCACdTdT | | | UCCAACAUdTdT | |
| | D-2803 | 7538 | GUUGGAGACUU | 2066 | 7539 | UAUUGCCCAAG | 2235 |
| | | | GGGCAAUCdTdT | | | UCUCCAACdTdT | |
| | D-2804 | 7540 | GGAGACUUGGG | 2067 | 7541 | UCACAUUGCCC | 2236 |
| | | | CAAUGUGCdTdT | | | AAGUCUCCdTdT | |
| | D-2805 | 7542 | GGCAAUGUGAC | 2068 | 7543 | UGUCAGCAGUC | 2237 |
| | | | UGCUGACCdTdT | | | ACAUUGCCdTdT | |
| | D-2806 | 7544 | CAAUGUGACUG | 2069 | 7545 | UUUGUCAGCAG | 2238 |
| | | | CUGACAACdTdT | | | UCACAUUGdTdT | |
| | D-2807 | 7546 | CUGACAAAGAU | 2070 | 7547 | UCCACACCAUCU | 2239 |
| | | | GGUGUGGCdTdT | | | UUGUCAGdTdT | |
| | D-2808 | 7548 | UGACAAAGAUG | 2071 | 7549 | UGCCACACCAUC | 2240 |
| | | | GUGUGGCCdTdT | | | UUUGUCAdTdT | |
| | D-2809 | 7550 | CUCAGGAGACC | 2072 | 7551 | UAUGCAAUGGU | 2241 |
| | | | AUUGCAUCdTdT | | | CUCCUGAGdTdT | |
| | D-2810 | 7552 | UCAGGAGACCA | 2073 | 7553 | UGAUGCAAUGG | 2242 |
| | | | UUGCAUCCdTdT | | | UCUCCUGAdTdT | |
| | D-2811 | 7554 | AGACCAUUGCA | 2074 | 7555 | UCCAAUGAUGC | 2243 |
| | | | UCAUUGGCdTdT | | | AAUGGUCUdTdT | |
| | D-2812 | 7556 | GACCAUUGCAU | 2075 | 7557 | UGCCAAUGAUG | 2244 |
| | | | CAUUGGCCdTdT | | | CAAUGGUCdTdT | |
| | D-2813 | 7558 | AUUGCAUCAUU | 2076 | 7559 | UUGCGGCCAAU | 2245 |
| | | | GGCCGCACdTdT | | | GAUGCAAUdTdT | |
| | D-2814 | 7560 | CAUUGGCCGCA | 2077 | 7561 | UACCAGUGUGC | 2246 |
| | | | CACUGGUCdTdT | | | GGCCAAUGdTdT | |
| | D-2815 | 7562 | CGCACACUGGU | 2078 | 7563 | UAUGGACCACC | 2247 |
| | | | GGUCCAUCdTdT | | | AGUGUGCGdTdT | |
| | D-2816 | 7564 | CACACUGGUGG | 2079 | 7565 | UUCAUGGACCA | 2248 |
| | | | UCCAUGACdTdT | | | CCAGUGUGdTdT | |
| | D-2817 | 7566 | ACACUGGUGGU | 2080 | 7567 | UUUCAUGGACC | 2249 |
| | | | CCAUGAACdTdT | | | ACCAGUGUdTdT | |
| | D-2818 | 7568 | UGGUGGUCCAU | 2081 | 7569 | UCUUUUUCAUG | 2250 |
| | | | GAAAAAGCdTdT | | | GACCACCAdTdT | |
| | D-2819 | 7570 | UGGUCCAUGAA | 2082 | 7571 | UCUGCUUUUUC | 2251 |
| | | | AAAGCAGCdTdT | | | AUGGACCAdTdT | |
| | D-2820 | 7572 | AAAGCAGAUGA | 2083 | 7573 | UGCCCAAGUCA | 2252 |
| | | | CUUGGGCCdTdT | | | UCUGCUUUdTdT | |
| | D-2821 | 7574 | GCAGAUGACUU | 2084 | 7575 | UUUUGCCCAAG | 2253 |
| | | | GGGCAAACdTdT | | | UCAUCUGCdTdT | |
| | D-2822 | 7576 | AUGACUUGGGC | 2085 | 7577 | UCACCUUUGCCC | 2254 |
| | | | AAAGGUGCdTdT | | | AAGUCAUdTdT | |
| | D-2823 | 7578 | UGACUUGGGCA | 2086 | 7579 | UCCACCUUUGCC | 2255 |
| | | | AAGGUGGCdTdT | | | CAAGUCAdTdT | |
| | D-2824 | 7580 | GACUUGGGCAA | 2087 | 7581 | UUCCACCUUUG | 2256 |
| | | | AGGUGGACdTdT | | | CCCAAGUCdTdT | |
| | D-2825 | 7582 | GUACAAAGACA | 2088 | 7583 | UCGUUUCCUGU | 2257 |
| | | | GGAAACGCdTdT | | | CUUUGUACdTdT | |
| | D-2826 | 7584 | ACAAAGACAGG | 2089 | 7585 | UAGCGUUUCCU | 2258 |
| | | | AAACGCUCdTdT | | | GUCUUUGUdTdT | |
| | D-2827 | 7586 | CAAAGACAGGA | 2090 | 7587 | UCAGCGUUUCC | 2259 |
| | | | AACGCUGCdTdT | | | UGUCUUUGdTdT | |
| | D-2828 | 7588 | AGGAAACGCUG | 2091 | 7589 | UCGACUUCCAG | 2260 |
| | | | GAAGUCGCdTdT | | | CGUUUCCUdTdT | |
| | D-2829 | 7590 | GUCGUUUGGCU | 2092 | 7591 | UCACCACAAGCC | 2261 |
| | | | UGUGGUGCdTdT | | | AAACGACdTdT | |
| | D-2830 | 7592 | UCGUUUGGCUU | 2093 | 7593 | UACACCACAAG | 2262 |
| | | | GUGGUGUCdTdT | | | CCAAACGAdTdT | |
| | D-2831 | 7594 | CGUUUGGCUUG | 2094 | 7595 | UUACACCACAA | 2263 |
| | | | UGGUGUACdTdT | | | GCCAAACGdTdT | |
| | D-2832 | 7596 | GUUUGGCUUGU | 2095 | 7597 | UUUACACCACA | 2264 |
| | | | GGUGUAACdTdT | | | AGCCAAACdTdT | |
| | D-2833 | 7598 | UUGGCUUGUGG | 2096 | 7599 | UAAUUACACCA | 2265 |
| | | | UGUAAUUCdTdT | | | CAAGCCAAdTdT | |
| | D-2834 | 7600 | GGCUUGUGGUG | 2097 | 7601 | UCCAAUUACAC | 2266 |
| | | | UAAUUGGCdTdT | | | CACAAGCCdTdT | |
| | D-2835 | 7602 | GCUUGUGGUGU | 2098 | 7603 | UCCCAAUUACA | 2267 |
| | | | AAUUGGGCdTdT | | | CCACAAGCdTdT | |
| | D-2836 | 7604 | CUUGUGGUGUA | 2099 | 7605 | UUCCCAAUUAC | 2268 |
| | | | AUUGGGACdTdT | | | ACCACAAGdTdT | |
| | D-2837 | 7606 | UGUGGUGUAAU | 2100 | 7607 | UGAUCCCAAUU | 2269 |
| | | | UGGGAUCCdTdT | | | ACACCACAdTdT | |
| | D-2838 | 7608 | GUGGUGUAAUU | 2101 | 7609 | UCGAUCCCAAU | 2270 |
| | | | GGGAUCGCdTdT | | | UACACCACdTdT | |
| | D-2839 | 7610 | UGGUGUAAUUG | 2102 | 7611 | UGCGAUCCCAA | 2271 |
| | | | GGAUCGCCdTdT | | | UUACACCAdTdT | |
| | D-2840 | 7612 | GUAAUUGGGAU | 2103 | 7613 | UUUGGGCGAUC | 2272 |
| | | | CGCCCAACdTdT | | | CCAAUUACdTdT | |
| | D-2841 | 7614 | UAAUUGGGAUC | 2104 | 7615 | UAUUGGGCGAU | 2273 |
| | | | GCCCAAUCdTdT | | | CCCAAUUAdTdT | |
| | D-2842 | 7616 | AAUUGGGAUCG | 2105 | 7617 | UUAUUGGGCGA | 2274 |
| | | | CCCAAUACdTdT | | | UCCCAAUUdTdT | |
| | D-2843 | 7618 | AUUGGGAUCGC | 2106 | 7619 | UUUAUUGGGCG | 2275 |
| | | | CCAAUAACdTdT | | | AUCCCAAUdTdT | |
| | D-2844 | 7620 | UUGGGAUCGCC | 2107 | 7621 | UUUUAUUGGGC | 2276 |
| | | | CAAUAAACdTdT | | | GAUCCCAAdTdT | |
| | D-2845 | 7622 | UGGGAUCGCCC | 2108 | 7623 | UGUUUAUUGGG | 2277 |
| | | | AAUAAACCdTdT | | | CGAUCCCAdTdT | |
| | D-2846 | 7624 | GGGAUCGCCCA | 2109 | 7625 | UUGUUUAUUGG | 2278 |
| | | | AUAAACACdTdT | | | GCGAUCCCdTdT | |
| | D-2847 | 7626 | AUCGCCCAAUA | 2110 | 7627 | UGAAUGUUUAU | 2279 |
| | | | AACAUUCCdTdT | | | UGGGCGAUdTdT | |
| | D-2848 | 7628 | CCAAUAAACAU | 2111 | 7629 | UCAAGGGAAUG | 2280 |
| | | | UCCCUUGCdTdT | | | UUUAUUGGdTdT | |
| | D-2849 | 7630 | CAAUAAACAUU | 2112 | 7631 | UCCAAGGGAAU | 2281 |
| | | | CCCUUGGCdTdT | | | GUUUAUUGdTdT | |
| | D-2850 | 7632 | AAUAAACAUUC | 2113 | 7633 | UUCCAAGGGAA | 2282 |
| | | | CCUUGGACdTdT | | | UGUUUAUUdTdT | |
| | D-2851 | 7634 | AUAAACAUUCC | 2114 | 7635 | UAUCCAAGGGA | 2283 |
| | | | CUUGGAUCdTdT | | | AUGUUUAUdTdT | |
| | D-2852 | 7636 | UAAACAUUCCC | 2115 | 7637 | UCAUCCAAGGG | 2284 |
| | | | UUGGAUGCdTdT | | | AAUGUUUAdTdT | |
| | D-2853 | 7638 | AAACAUUCCCU | 2116 | 7639 | UACAUCCAAGG | 2285 |
| | | | UGGAUGUCdTdT | | | GAAUGUUUdTdT | |
| | D-2854 | 7640 | AACAUUCCCUU | 2117 | 7641 | UUACAUCCAAG | 2286 |
| | | | GGAUGUACdTdT | | | GGAAUGUUdTdT | |
| | D-2855 | 7642 | AUUCCCUUGGA | 2118 | 7643 | UGACUACAUCC | 2287 |
| | | | UGUAGUCCdTdT | | | AAGGGAAUdTdT | |
| | D-2856 | 7644 | CUUGGAUGUAG | 2119 | 7645 | UCCUCAGACUA | 2288 |
| | | | UCUGAGGCdTdT | | | CAUCCAAGdTdT | |
| | D-2857 | 7646 | CUGAGGCCCCU | 2120 | 7647 | UUGAGUUAAGG | 2289 |
| | | | UAACUCACdTdT | | | GGCCUCAGdTdT | |
| | D-2858 | 7648 | GAGGCCCCUUA | 2121 | 7649 | UGAUGAGUUAA | 2290 |
| | | | ACUCAUCCdTdT | | | GGGGCCUCdTdT | |
| | D-2859 | 7650 | AGGCCCCUUAA | 2122 | 7651 | UAGAUGAGUUA | 2291 |
| | | | CUCAUCUCdTdT | | | AGGGGCCUdTdT | |
| | D-2860 | 7652 | CCCCUUAACUCA | 2123 | 7653 | UAACAGAUGAG | 2292 |
| | | | UCUGUUCdTdT | | | UUAAGGGGdTdT | |
| | D-2861 | 7654 | CCCUUAACUCA | 2124 | 7655 | UUAACAGAUGA | 2293 |
| | | | UCUGUUACdTdT | | | GUUAAGGGdTdT | |
| | D-2862 | 7656 | CCUUAACUCAU | 2125 | 7657 | UAUAACAGAUG | 2294 |
| | | | CUGUUAUCdTdT | | | AGUUAAGGdTdT | |
| | D-2863 | 7658 | CUUAACUCAUC | 2126 | 7659 | UGAUAACAGAU | 2295 |
| | | | UGUUAUCCdTdT | | | GAGUUAAGdTdT | |
| | D-2864 | 7660 | UUAACUCAUCU | 2127 | 7661 | UGGAUAACAGA | 2296 |
| | | | GUUAUCCCdTdT | | | UGAGUUAAdTdT | |
| | D-2865 | 7662 | UAACUCAUCUG | 2128 | 7663 | UAGGAUAACAG | 2297 |
| | | | UUAUCCUCdTdT | | | AUGAGUUAdTdT | |
| | D-2866 | 7664 | AACUCAUCUGU | 2129 | 7665 | UCAGGAUAACA | 2298 |
| | | | UAUCCUGCdTdT | | | GAUGAGUUdTdT | |
| | D-2867 | 7666 | GUUAUCCUGCU | 2130 | 7667 | UUACAGCUAGC | 2299 |
| | | | AGCUGUACdTdT | | | AGGAUAACdTdT | |
| | D-2868 | 7668 | CUGCUAGCUGU | 2131 | 7669 | UCAUUUCUACA | 2300 |
| | | | AGAAAUGCdTdT | | | GCUAGCAGdTdT | |
| | D-2869 | 7670 | UGCUAGCUGUA | 2132 | 7671 | UACAUUUCUAC | 2301 |
| | | | GAAAUGUCdTdT | | | AGCUAGCAdTdT | |
| | D-2870 | 7672 | GCUGUAGAAAU | 2133 | 7673 | UAGGAUACAUU | 2302 |
| | | | GUAUCCUCdTdT | | | UCUACAGCdTdT | |
| | D-2871 | 7674 | CUGUAGAAAUG | 2134 | 7675 | UCAGGAUACAU | 2303 |
| | | | UAUCCUGCdTdT | | | UUCUACAGdTdT | |
| | D-2872 | 7676 | UGUAGAAAUGU | 2135 | 7677 | UUCAGGAUACA | 2304 |
| | | | AUCCUGACdTdT | | | UUUCUACAdTdT | |
| | D-2873 | 7678 | GUAGAAAUGUA | 2136 | 7679 | UAUCAGGAUAC | 2305 |
| | | | UCCUGAUCdTdT | | | AUUUCUACdTdT | |
| | D-2874 | 7680 | AAAUGUAUCCU | 2137 | 7681 | UGUUUAUCAGG | 2306 |
| | | | GAUAAACCdTdT | | | AUACAUUUdTdT | |
| | D-2875 | 7682 | GUAUCCUGAUA | 2138 | 7683 | UUAAUGUUUAU | 2307 |
| | | | AACAUUACdTdT | | | CAGGAUACdTdT | |
| | D-2876 | 7684 | UUAAACACUGU | 2139 | 7685 | UUAAGAUUACA | 2308 |
| | | | AAUCUUACdTdT | | | GUGUUUAAdTdT | |
| | D-2877 | 7686 | ACUGUAAUCUU | 2140 | 7687 | UCACUUUUAAG | 2309 |
| | | | AAAAGUGCdTdT | | | AUUACAGUdTdT | |
| | D-2878 | 7688 | CUGUAAUCUUA | 2141 | 7689 | UACACUUUUAA | 2310 |
| | | | AAAGUGUCdTdT | | | GAUUACAGdTdT | |
| | D-2879 | 7690 | UGUAAUCUUAA | 2142 | 7691 | UUACACUUUUA | 2311 |
| | | | AAGUGUACdTdT | | | AGAUUACAdTdT | |
| | D-2880 | 7692 | GUAAUCUUAAA | 2143 | 7693 | UUUACACUUUU | 2312 |
| | | | AGUGUAACdTdT | | | AAGAUUACdTdT | |
| | D-2881 | 7694 | CUUAAAAGUGU | 2144 | 7695 | UCACAAUUACA | 2313 |
| | | | AAUUGUGCdTdT | | | CUUUUAAGdTdT | |
| | D-2882 | 7696 | UACCUGUAGUG | 2145 | 7697 | UAGUUUCUCAC | 2314 |
| | | | AGAAACUCdTdT | | | UACAGGUAdTdT | |
| | D-2883 | 7698 | UUAUGAUCACU | 2146 | 7699 | UUCUUCCAAGU | 2315 |
| | | | UGGAAGACdTdT | | | GAUCAUAAdTdT | |
| | D-2884 | 7700 | AUGAUCACUUG | 2147 | 7701 | UAAUCUUCCAA | 2316 |
| | | | GAAGAUUCdTdT | | | GUGAUCAUdTdT | |
| | D-2885 | 7702 | AUCACUUGGAA | 2148 | 7703 | UACAAAUCUUC | 2317 |
| | | | GAUUUGUCdTdT | | | CAAGUGAUdTdT | |
| | D-2886 | 7704 | UGGAAGAUUUG | 2149 | 7705 | UAACUAUACAA | 2318 |
| | | | UAUAGUUCdTdT | | | AUCUUCCAdTdT | |
| | D-2887 | 7706 | UAUAAAACUCA | 2150 | 7707 | UUUUUAACUGA | 2319 |
| | | | GUUAAAACdTdT | | | GUUUUAUAdTdT | |
| | D-2888 | 7708 | AAACUCAGUUA | 2151 | 7709 | UGACAUUUUAA | 2320 |
| | | | AAAUGUCCdTdT | | | CUGAGUUUdTdT | |
| | D-2889 | 7710 | GUCUGUUUCAA | 2152 | 7711 | UCAGGUCAUUG | 2321 |
| | | | UGACCUGCdTdT | | | AAACAGACdTdT | |
| | D-2890 | 7712 | AUGACCUGUAU | 2153 | 7713 | UUGGCAAAAUA | 2322 |
| | | | UUUGCCACdTdT | | | CAGGUCAUdTdT | |
| | D-2891 | 7714 | ACCUGUAUUUU | 2154 | 7715 | UGUCUGGCAAA | 2323 |
| | | | GCCAGACCdTdT | | | AUACAGGUdTdT | |
| | D-2892 | 7716 | CCUGUAUUUUG | 2155 | 7717 | UAGUCUGGCAA | 2324 |
| | | | CCAGACUCdTdT | | | AAUACAGGdTdT | |
| | D-2893 | 7718 | UAAAUCACAGA | 2156 | 7719 | UAUACCCAUCU | 2325 |
| | | | UGGGUAUCdTdT | | | GUGAUUUAdTdT | |
| | D-2894 | 7720 | AUCACAGAUGG | 2157 | 7721 | UUUAAUACCCA | 2326 |
| | | | GUAUUAACdTdT | | | UCUGUGAUdTdT | |
| | D-2895 | 7722 | UCACAGAUGGG | 2158 | 7723 | UUUUAAUACCC | 2327 |
| | | | UAUUAAACdTdT | | | AUCUGUGAdTdT | |
| | D-2896 | 7724 | ACAGAUGGGUA | 2159 | 7725 | UAGUUUAAUAC | 2328 |
| | | | UUAAACUCdTdT | | | CCAUCUGUdTdT | |
| | D-2897 | 7726 | CAGAUGGGUAU | 2160 | 7727 | UAAGUUUAAUA | 2329 |
| | | | UAAACUUCdTdT | | | CCCAUCUGdTdT | |
| | D-2898 | 7728 | AGAUGGGUAUU | 2161 | 7729 | UCAAGUUUAAU | 2330 |
| | | | AAACUUGCdTdT | | | ACCCAUCUdTdT | |
| | D-2899 | 7730 | AUGGGUAUUAA | 2162 | 7731 | UGACAAGUUUA | 2331 |
| | | | ACUUGUCCdTdT | | | AUACCCAUdTdT | |
| | D-2900 | 7732 | UAAACUUGUCA | 2163 | 7733 | UGAAAUUCUGA | 2332 |
| | | | GAAUUUCCdTdT | | | CAAGUUUAdTdT | |
| | D-2901 | 7734 | UCAUUCAAGCC | 2164 | 7735 | UAUUCACAGGC | 2333 |
| | | | UGUGAAUCdTdT | | | UUGAAUGAdTdT | |
| | D-2902 | 7736 | CAUUCAAGCCU | 2165 | 7737 | UUAUUCACAGG | 2334 |
| | | | GUGAAUACdTdT | | | CUUGAAUGdTdT | |
| | D-2903 | 7738 | AAUAAAAACCC | 2166 | 7739 | UCCAUACAGGG | 2335 |
| | | | UGUAUGGCdTdT | | | UUUUUAUUdTdT | |
| | D-2904 | 7740 | AUAAAAACCCU | 2167 | 7741 | UGCCAUACAGG | 2336 |
| | | | GUAUGGCCdTdT | | | GUUUUUAUdTdT | |
| | D-2905 | 7742 | AACCCUGUAUG | 2168 | 7743 | UUAAGUGCCAU | 2337 |
| | | | GCACUUACdTdT | | | ACAGGGUUdTdT | |
| | D-2906 | 7744 | ACCCUGUAUGG | 2169 | 7745 | UAUAAGUGCCA | 2338 |
| | | | CACUUAUCdTdT | | | UACAGGGUdTdT | |
| | D-2907 | 7746 | GAGGCUAUUAA | 2170 | 7747 | UGAUUCUUUUA | 2339 |
| | | | AAGAAUCCdTdT | | | AUAGCCUCdTdT | |
| | D-2908 | 7748 | AAAGAAUCCAA | 2171 | 7749 | UUUUGAAUUUG | 2340 |
| | | | AUUCAAACdTdT | | | GAUUCUUUdTdT | |
| | D-2909 | 7750 | GAAUCCAAAUU | 2172 | 7751 | UUAGUUUGAAU | 2341 |
| | | | CAAACUACdTdT | | | UUGGAUUCdTdT | |
| VOYpre- | D-2910 | 7752 | CAAUGUGACUG | 2342 | 7753 | UUUGUCAGCAG | 2343 |
| 001_D- | | | CUGACAACCC | | | UCACAUUGUU | |
| 2806_Starting | | | | | | | |
| construct (18 | | | | | | | |
| native | | | | | | | |
| nucleotides and | | | | | | | |
| position 19 is | | | | | | | |
| C; 3′ terminal | | | | | | | |
| CC | | | | | | | |
| dinucleotide) | | | | | | | |
| VOYpre- | D-2911 | 7754 | CAAUGUGACUG | 2344 | 7753 | UUUGUCAGCAG | 2343 |
| 002_D- | | | CUGACAAUCC | | | UCACAUUGUU | |
| 2806_p19MMU | | | | | | | |
| (position 19 U | | | | | | | |
| to form | | | | | | | |
| mismatch) | | | | | | | |
| VOYpre- | D-2912 | 7755 | CAAUGUGACUG | 2345 | 7753 | UUUGUCAGCAG | 2343 |
| 003_D- | | | CUGACAAGCC | | | UCACAUUGUU | |
| 2806_p19GUpair | | | | | | | |
| (position 19 | | | | | | | |
| is G to form GU | | | | | | | |
| pair) | | | | | | | |
| VOYpre- | D-2913 | 7756 | CAAUGUGACUG | 2346 | 7753 | UUUGUCAGCAG | 2343 |
| 004_D- | | | CUGACAAACC | | | UCACAUUGUU | |
| 2806_p19AUpair | | | | | | | |
| (position 19 | | | | | | | |
| is A to form AU | | | | | | | |
| pair) | | | | | | | |
| VOYpre- | D-2914 | 7757 | CAAUGUGACAG | 2347 | 7753 | UUUGUCAGCAG | 2343 |
| 005_D- | | | CUGACAAACC | | | UCACAUUGUU | |
| 2806_CMM | | | | | | | |
| (central | | | | | | | |
| mismatch) | | | | | | | |
| VOYpre- | D-2915 | 7758 | CAAUGUGACUG | 2348 | 7753 | UUUGUCAGCAG | 2343 |
| 006_D- | | | CUGACAACC | | | UCACAUUGUU | |
| 2806_p19DEL | | | | | | | |
| (position 19 | | | | | | | |
| deleted) | | | | | | | |
| VOYpre- | D-2916 | 7759 | CAAUGUGACUG | 2349 | 7753 | UUUGUCAGCAG | 2343 |
| 007_D- | | | CUGACAAUCCC | | | UCACAUUGUU | |
| 2806_p19ADD | | | | | | | |
| (nucleotide | | | | | | | |
| added at | | | | | | | |
| position 19; | | | | | | | |
| addition is U; | | | | | | | |
| keep C and | | | | | | | |
| terminal CC | | | | | | | |
| dinucleotide) | | | | | | | |
| VOYpre- | D-2917 | 7752 | CAAUGUGACUG | 2342 | 7753 | UUUGUCAGCAG | 2343 |
| 008_D- | | | CUGACAACCC | | | UCACAUUGUU | |
| 2806_Uloop | | | | | | | |
| VOYpre- | D-2918 | 7752 | CAAUGUGACUG | 2342 | 7753 | UUUGUCAGCAG | 2343 |
| 009_D- | | | CUGACAACCC | | | UCACAUUGUU | |
| 2806_AUloop | | | | | | | |
| VOYpre- | D-2919 | 7760 | CAAUGUGACUG | 2350 | 7753 | UUUGUCAGCAG | 2343 |
| 010_D- | | | CUGACAACAC | | | UCACAUUGUU | |
| 2806_mir-22- | | | | | | | |
| loop | | | | | | | |
| VOYmiR- | D-2923 | 7752 | CAAUGUGACUG | 2342 | 7753 | UUUGUCAGCAG | 2343 |
| 101_pre-001 | | | CUGACAACCC | | | UCACAUUGUU | |
| hsa-mir-155; D- | | | | | | | |
| 2806 | | | | | | | |
| VOYmiR- | D-2924 | 7752 | CAAUGUGACUG | 2342 | 7753 | UUUGUCAGCAG | 2343 |
| 102_pre-001 | | | CUGACAACCC | | | UCACAUUGUU | |
| Engineered; D- | | | | | | | |
| 2806; let-7b | | | | | | | |
| stem | | | | | | | |
| VOYmiR- | D-2925 | 7754 | CAAUGUGACUG | 2344 | 7753 | UUUGUCAGCAG | 2343 |
| 103_pre-002 | | | CUGACAAUCC | | | UCACAUUGUU | |
| Engineered; D- | | | | | | | |
| 2806_p19MMU; | | | | | | | |
| let-7b stem | | | | | | | |
| VOYmiR- | D-2926 | 7755 | CAAUGUGACUG | 2345 | 7753 | UUUGUCAGCAG | 2343 |
| 104_pre-003 | | | CUGACAAGCC | | | UCACAUUGUU | |
| Engineered; D- | | | | | | | |
| 2806_ | | | | | | | |
| p19GUpair; | | | | | | | |
| let-7b stem | | | | | | | |
| VOYmiR- | D-2927 | 7756 | CAAUGUGACUG | 2346 | 7753 | UUUGUCAGCAG | 2343 |
| 105_pre-004 | | | CUGACAAACC | | | UCACAUUGUU | |
| Engineered; D- | | | | | | | |
| 2806_p19AUpair; | | | | | | | |
| let-7b stem | | | | | | | |
| VOYmiR- | D-2928 | 7757 | CAAUGUGACAG | 2347 | 7753 | UUUGUCAGCAG | 2343 |
| 106_pre-005 | | | CUGACAAACC | | | UCACAUUGUU | |
| Engineered; D- | | | | | | | |
| 2806_CMM; | | | | | | | |
| let-7b stem | | | | | | | |
| VOYmiR- | D-2929 | 7758 | CAAUGUGACUG | 2348 | 7753 | UUUGUCAGCAG | 2343 |
| 107_pre-006 | | | CUGACAACC | | | UCACAUUGUU | |
| Engineered; D- | | | | | | | |
| 2806_p19DEL; | | | | | | | |
| let-7b stem | | | | | | | |
| VOYmiR- | D-2930 | 7765 | CAAUGUGACUG | 2355 | 7753 | UUUGUCAGCAG | 2343 |
| 108_pre-007 | | | CUGACAAUCCC | | | UCACAUUGUU | |
| Engineered; D- | | | | | | | |
| 2806_p19ADD; | | | | | | | |
| let-7b stem | | | | | | | |
| VOYmiR- | D-2931 | 7752 | CAAUGUGACUG | 2342 | 7753 | UUUGUCAGCAG | 2343 |
| 109_pre-008 | | | CUGACAACCC | | | UCACAUUGUU | |
| Engineered; D- | | | | | | | |
| 2806_Uloop; | | | | | | | |
| let-7b stem | | | | | | | |
| VOYmiR- | D-2932 | 7752 | CAAUGUGACUG | 2342 | 7753 | UUUGUCAGCAG | 2343 |
| 110_pre-009 | | | CUGACAACCC | | | UCACAUUGUU | |
| Engineered; D- | | | | | | | |
| 2806_AUloop; | | | | | | | |
| let-7b stem | | | | | | | |
| VOYmiR- | D-2933 | 7760 | CAAUGUGACUG | 2350 | 7753 | UUUGUCAGCAG | 2343 |
| 111_pre-010 | | | CUGACAACAC | | | UCACAUUGUU | |
| Engineered; D- | | | | | | | |
| 2806_mir-22- | | | | | | | |
| loop; let-7b | | | | | | | |
| stem | | | | | | | |
| VOYmiR- | D-2934 | 7752 | CAAUGUGACUG | 2342 | 7753 | UUUGUCAGCAG | 2343 |
| 112_pre-001 | | | CUGACAACCC | | | UCACAUUGUU | |
| Engineered; | | | | | | | |
| PD; D-2806; | | | | | | | |
| let-7b basal- | | | | | | | |
| stem | | | | | | | |
| instability | | | | | | | |
| VOYmiR- | D-2935 | 7754 | CAAUGUGACUG | 2344 | 7753 | UUUGUCAGCAG | 2343 |
| 113_pre-002 | | | CUGACAAUCC | | | UCACAUUGUU | |
| Engineered; D- | | | | | | | |
| 2806_p19MMU; | | | | | | | |
| let-7b basal- | | | | | | | |
| stem | | | | | | | |
| instability | | | | | | | |
| VOYmiR- | D-2936 | 7757 | CAAUGUGACAG | 2347 | 7753 | UUUGUCAGCAG | 2343 |
| 114_pre-005 | | | CUGACAAACC | | | UCACAUUGUU | |
| Engineered; D- | | | | | | | |
| 2806_CMM; | | | | | | | |
| let-7b basal- | | | | | | | |
| stem | | | | | | | |
| instability | | | | | | | |
| VOYmiR- | D-2937 | 7760 | CAAUGUGACUG | 2350 | 7753 | UUUGUCAGCAG | 2343 |
| 115_pre-010 | | | CUGACAACAC | | | UCACAUUGUU | |
| Engineered; D- | | | | | | | |
| 2806_mir-22- | | | | | | | |
| loop; let-7b | | | | | | | |
| basal-stem | | | | | | | |
| instability | | | | | | | |
| VOYmiR- | D-2938 | 7755 | CAAUGUGACUG | 2345 | 7753 | UUUGUCAGCAG | 2343 |
| 116_pre-003 | | | CUGACAAGCC | | | UCACAUUGUU | |
| Engineered; D- | | | | | | | |
| 2806_p19GUpair; | | | | | | | |
| let-7b basal- | | | | | | | |
| stem | | | | | | | |
| instability | | | | | | | |
| VOYmiR- | D-2939 | 7766 | CGACGAAGGCC | 2356 | 7767 | UCGCACACGGCC | 2357 |
| 117_pre-001 | | | GUGUGCGCCC | | | UUCGUCGUU | |
| Engineered; D- | | | | | | | |
| 2757; let-7b | | | | | | | |
| stem | | | | | | | |
| VOYmiR- | D-2940 | 7768 | UGACUUGGGCA | 2358 | 7769 | UCCACCUUUGCC | 2359 |
| 118_pre-001 | | | AAGGUGGCCC | | | CAAGUCAUU | |
| Engineered; D- | | | | | | | |
| 2823; let-7b | | | | | | | |
| stem | | | | | | | |
| VOYmiR- | D-2941 | 7770 | AACUCAUCUGU | 2360 | 7771 | UCAGGAUAACA | 2361 |
| 119_pre-001 | | | UAUCCUGCCC | | | GAUGAGUUUU | |
| Engineered; D- | | | | | | | |
| 2866; let-7b | | | | | | | |
| stem | | | | | | | |
| VOYpre- | D-2920 | 7761 | UUUGUCAGCAG | 2351 | 7762 | CAAUGUGACUG | 2352 |
| 011_D-2806_ | | | UCACAUUGUC | | | CUGACAAAUC | |
| passenger | | | | | | | |
| -guide strand | | | | | | | |
| swap with | | | | | | | |
| terminal 3′ C | | | | | | | |
| on passenger | | | | | | | |
| strand | | | | | | | |
| VOYpre- | D-2921 | 7761 | UUUGUCAGCAG | 2351 | 7763 | CAAUGUGACUG | 2353 |
| 012_D-2806 | | | UCACAUUGUC | | | CUGACAAUUC | |
| passenger-guide | | | | | | | |
| strand swap | | | | | | | |
| with | | | | | | | |
| terminal 3′ | | | | | | | |
| C on passenger | | | | | | | |
| strand | | | | | | | |
| VOYpre- | D-2922 | 7764 | UUUGUCAGCAG | 2354 | 7762 | CAAUGUGACUG | 2352 |
| 013_D-2806 | | | UCACAUUGAC | | | CUGACAAAUC | |
| passenger-guide | | | | | | | |
| strand swap | | | | | | | |
| with terminal 3′ | | | | | | | |
| C on passenger | | | | | | | |
| strand | | | | | | | |
| VOYmiR-127 | D-2942 | 7752 | CAAUGUGACUG | 2342 | 7753 | UUUGUCAGCAG | 2343 |
| | | | CUGACAACCC | | | UCACAUUGUU | |
| VOYmiR- | D-2943 | 7772 | CCCCUUAACUCA | 2362 | 7773 | UAACAGAUGAG | 2363 |
| 102.860 | | | UCUGUUCCC | | | UUAAGGGGUU | |
| VOYmiR | D-2944 | 7774 | CCCUUAACUCA | 2364 | 7775 | UUAACAGAUGA | 2365 |
| 102.861 | | | UCUGUUACCC | | | GUUAAGGGUU | |
| VOYmiR- | D-2945 | 7776 | AACUCAUCUGU | 2366 | 7771 | UCAGGAUAACA | 2361 |
| 102.866 | | | UAUCUUGCCC | | | GAUGAGUUUU | |
| VOYmiR- | D-2946 | 7777 | GCUGUGGAAAU | 2367 | 7778 | UAGGAUACAUU | 2368 |
| 102.870 | | | GUAUCUUCCC | | | UCUACAGCUU | |
| VOYmiR- | D-2947 | 7779 | UGACUUGGGCA | 2369 | 7769 | UCCACCUUUGCC | 2359 |
| 102.823 | | | AAGGUGAGCC | | | CAAGUCAUU | |
| VOYmiR- | D-2948 | 7780 | CCCCUUAACUCA | 2370 | 7773 | UAACAGAUGAG | 2363 |
| 104.860 | | | UCUGUUGCC | | | UUAAGGGGUU | |
| VOYmiR- | D-2949 | 7781 | CCCUUAACUCA | 2371 | 7775 | UUAACAGAUGA | 2365 |
| 104.861 | | | UCUGUUAGCC | | | GUUAAGGGUU | |
| VOYmiR- | D-2950 | 7782 | AACUCAUCUGU | 2372 | 7771 | UCAGGAUAACA | 2361 |
| 104.866 | | | UAUCUUAGCO | | | GAUGAGUUUU | |
| VOYmiR- | D-2951 | 7783 | GCUGUGGAAAU | 2373 | 7778 | UAGGAUACAUU | 2368 |
| 104.870 | | | GUAUCUUGCC | | | UCUACAGCUU | |
| VOYmiR- | D-2952 | 7784 | UGACUUGGGCA | 2374 | 7769 | UCCACCUUUGCC | 2359 |
| 104.823 | | | AAGGUAGGCC | | | CAAGUCAUU | |
| VOYmiR- | D-2953 | 7772 | CCCCUUAACUCA | 2362 | 7773 | UAACAGAUGAG | 2363 |
| 109.860 | | | UCUGUUCCC | | | UUAAGGGGUU | |
| VOYmiR- | D-2954 | 7774 | CCCUUAACUCA | 2364 | 7775 | UUAACAGAUGA | 2365 |
| 104.861 | | | UCUGUUACCC | | | GUUAAGGGUU | |
| VOYmiR- | D-2955 | 7776 | AACUCAUCUGU | 2366 | 7771 | UCAGGAUAACA | 2361 |
| 104.866 | | | UAUCUUGCCC | | | GAUGAGUUUU | |
| VOYmiR- | D-2956 | 7777 | GCUGUGGAAAU | 2367 | 7778 | UAGGAUACAUU | 2368 |
| 109.870 | | | GUAUCUUCCC | | | UCUACAGCUU | |
| VOYmiR- | D-2957 | 7779 | UGACUUGGGCA | 2369 | 7769 | UCCACCUUUGCC | 2359 |
| 109.823 | | | AAGGUGAGCC | | | CAAGUCAUU | |
| VOYmiR- | D-2958 | 7785 | CCCCUUAACACA | 2375 | 7773 | UAACAGAUGAG | 2363 |
| 114.860 | | | UCUGUUACC | | | UUAAGGGGUU | |
| VOYmiR- | D-2959 | 7786 | CCCUUAACUGA | 2376 | 7775 | UUAACAGAUGA | 2365 |
| 114.861 | | | UCUGUUAACC | | | GUUAAGGGUU | |
| VOYmiR- | D-2960 | 7787 | AACUCAUCUCU | 2377 | 7771 | UCAGGAUAACA | 2361 |
| 114.866 | | | UAUCUUGCCC | | | GAUGAGUUUU | |
| VOYmiR- | D-2961 | 7788 | GCUGUGGAAUU | 2378 | 7778 | UAGGAUACAUU | 2368 |
| 114.870 | | | GUAUCUUGCC | | | UCUACAGCUU | |
| VOYmiR- | D-2962 | 7789 | UGACUUGGGGA | 2379 | 7769 | UCCACCUUUGCC | 2359 |
| 114.823 | | | AAGGUGAGCC | | | CAAGUCAUU | |
| VOYmiR- | D-2963 | 7780 | CCCCUUAACUCA | 2370 | 7773 | UAACAGAUGAG | 2363 |
| 116.860 | | | UCUGUUGCC | | | UUAAGGGGUU | |
| VOYmiR- | D-2964 | 7781 | CCCUUAACUCA | 2371 | 7775 | UUAACAGAUGA | 2365 |
| 116.861 | | | UCUGUUAGCC | | | GUUAAGGGUU | |
| VOYmiR- | D-2965 | 7790 | AACUCAUCUGU | 2380 | 7771 | UCAGGAUAACA | 2361 |
| 116.866 | | | UAUCUUGGCC | | | GAUGAGUUUU | |
| VOYmiR- | D-2966 | 7783 | GCUGUGGAAAU | 2373 | 7778 | UAGGAUACAUU | 2368 |
| 116.870 | | | GUAUCUUGCC | | | UCUACAGCUU | |
| VOYmiR- | D-2967 | 7784 | UGACUUGGGCA | 2374 | 7769 | UCCACCUUUGCC | 2359 |
| 116.823 | | | AAGGUAGGCC | | | CAAGUCAUU | |
| VoymiR- | D-2968 | 7791 | CCCCUUAACUCA | 2381 | 7773 | UAACAGAUGAG | 2363 |
| 127.860 | | | UUUGUUCCC | | | UUAAGGGGUU | |
| VoymiR- | D-2969 | 7774 | CCCUUAACUCA | 2364 | 7775 | UUAACAGAUGA | 2365 |
| 127.861 | | | UCUGUUACCC | | | GUUAAGGGUU | |
| VoymiR- | D-2970 | 7776 | AACUCAUCUGU | 2366 | 7771 | UCAGGAUAACA | 2361 |
| 127.866 | | | UAUCUUGCCC | | | GAUGAGUUUU | |
| VoymiR- | D-2971 | 7777 | GCUGUGGAAAU | 2367 | 7778 | UAGGAUACAUU | 2368 |
| 127.870 | | | GUAUCUUCCC | | | UCUACAGCUU | |
| VoymiR- | D-2972 | 7792 | UGACUUGGGCA | 2382 | 7769 | UCCACCUUUGCC | 2359 |
| 127.823 | | | AAGGUAGCCC | | | CAAGUCAUU | |
| VOYmiR-120 | D-2973 | 7793 | CAAUGUGACUG | 2383 | 7794 | UUUGUCAGCAG | 2384 |
| | | | CUGACAAA | | | UCACAUUGUC | |
| dVOYmiR- | D-2974 | 7795 | GCAGGUCCUCA | 2385 | 7796 | GAUUAAAGUGA | 2386 |
| 102.788 | | | CUUUAAUGCC | | | GGACCUGCUU | |
| dVOYmiR- | D-2975 | 7797 | GGCAAUGUGAC | 2387 | 7798 | UGUCAGCAGUC | 2388 |
| 102.805 | | | UGCUGACCCC | | | ACAUUGCCUU | |
| dVOYmiR- | D-2976 | 7799 | GCAGGUCCUCA | 2389 | 7796 | GAUUAAAGUGA | 2386 |
| 104.788 | | | CUUUAAUUCC | | | GGACCUGCUU | |
| dVOYmiR- | D-2977 | 7800 | GGCAAUGUGAC | 2390 | 7798 | UGUCAGCAGUC | 2388 |
| 104.805 | | | UGCUGAUGCC | | | ACAUUGCCUU | |
| dVOYmiR- | D-2978 | 7801 | GCAGGUCCUCA | 2391 | 7796 | GAUUAAAGUGA | 2386 |
| 109.788 | | | CUUUAAUCCC | | | GGACCUGCUU | |
| dVOYmiR- | D-2979 | 7802 | GGCAAUGUGAC | 2392 | 7798 | UGUCAGCAGUC | 2388 |
| 109.805 | | | UGCUGAUACC | | | ACAUUGCCUU | |
| dVOYmiR- | D-2980 | 7803 | GCAGGUCCUGA | 2393 | 7796 | GAUUAAAGUGA | 2386 |
| 114.788 | | | CUUUAAUCCC | | | GGACCUGCUU | |
| dVOYmiR- | D-2981 | 7804 | GGCAAUGUGUC | 2394 | 7798 | UGUCAGCAGUC | 2388 |
| 114.805 | | | UGCUGAUACC | | | ACAUUGCCUU | |
| dVOYmiR- | D-2982 | 7801 | GCAGGUCCUCA | 2391 | 7796 | GAUUAAAGUGA | 2386 |
| 116.788 | | | CUUUAAUCCC | | | GGACCUGCUU | |
| dVOYmiR- | D-2983 | 7802 | GGCAAUGUGAC | 2392 | 7798 | UGUCAGCAGUC | 2388 |
| 116.805 | | | UGCUGAUACC | | | ACAUUGCCUU | |
| dVoymiR- | D-2984 | 7801 | GCAGGUCCUCA | 2391 | 7805 | GAUUAAAGUGA | 2395 |
| 127.788 | | | CUUUAAUCCC | | | GGACCUGCUUU | |
| dVoymiR- | D-2985 | 7802 | GGCAAUGUGAC | 2392 | 7806 | UGUCAGCAGUC | 2396 |
| 127.805 | | | UGCUGAUACC | | | ACAUUGCCUUU | |
| | D-4009 | S-4000 | GUCGUUUGGCU | 2522 | A- | UCACCACAAGCC | 2505 |
| | | | UGUGGUGGCU | | 4000 | AAACGACUU | |
| | D-4010 | S-4001 | CAGGUCCUCAC | 2523 | A- | UGAUUAAAGUG | 2506 |
| | | | UUUAAUCGCU | | 4001 | AGGACCUGUU | |
| | D-4011 | S-4002 | GCAGGUCCUCA | 2524 | A- | UAUUAAAGUGA | 2507 |
| | | | CUUUAAUGCC | | 4002 | GGACCUGCUU | |
| | D-4012 | S-4003 | GCAGGUCCUCA | 2525 | A- | UAUUAAAGUGA | 2507 |
| | | | CUUUAAUGCU | | 4002 | GGACCUGCUU | |
| | D-4013 | S-4004 | UCGUUUGGCUU | 2526 | A- | UACACCACAAG | 2508 |
| | | | GUGGUGUGCU | | 4003 | CCAAACGAUU | |
| | D-4015 | S-4006 | GUCGUUUGGCU | 2528 | A- | UCACCACAAGCC | 2510 |
| | | | UGUGGUGGCC | | 4005 | AAACGACUUU | |
| | D-4016 | S-4007 | CAGGUCCUCAC | 2529 | A- | UGAUUAAAGUG | 2506 |
| | | | UUUAAUCGCC | | 4001 | AGGACCUGUU | |
| | D-4017 | S-4008 | UCGUUUGGCUU | 2530 | A- | UACACCACAAG | 2508 |
| | | | GUGGUGUGCC | | 4003 | CCAAACGAUU | |
| | D-4018 | S-4009 | GGCAAUGUGAC | 2531 | A- | UGCCAGCAGUC | 2511 |
| | | | UGCUGGUGCC | | 4006 | ACAUUGCCUU | |
| | D-4019 | S-4010 | GGCAAUGUGAC | 2532 | A- | UGCCAGCAGUC | 2511 |
| | | | UGCUGGUACC | | 4006 | ACAUUGCCUU | |
| | D-4020 | S-4011 | GGCAAUGUGUC | 2533 | A- | UGCCAGCAGUC | 2511 |
| | | | UGCUGGUACC | | 4006 | ACAUUGCCUU | |
| | D-4021 | S-4012 | GGCAAUGUGAC | 2534 | A- | UGCCAGCAGUC | 2511 |
| | | | UGCUGGCCCC | | 4006 | ACAUUGCCUU | |

[1321] The passenger and guide strands are described in the Table 10. The “miR” component of the name of the sequence does not necessarily correspond to the sequence numbering of miRNA genes (e.g., VOYmiR-101 is the name of the sequence and does not necessarily mean that miR-101 is part of the sequence).

[1322] In some embodiments, the dTdT nucleotides of the sense strand and/or the antisense strand of the siRNA may be replaced with any two nucleotides (e.g., UU, UC, AA, AG, AC, etc.). Alternatively, the dTdT nucleotides of the sense strand and/or the antisense strand may be replaced with a single nucleotide (e.g., U, A, C, or G).

[1323] In other embodiments, the siRNA molecules of the present disclosure targeting SOD1 can be encoded in plasmid vectors, AAV particles, viral genome or other nucleic acid expression vectors for delivery to a cell.

[1324] DNA expression plasmids can be used to stably express the siRNA duplexes or dsRNA of the present disclosure targeting SOD1 in cells and achieve long-term inhibition of the target gene expression. In one aspect, the sense and antisense strands of a siRNA duplex are typically linked by a short spacer sequence leading to the expression of a stem-loop structure termed short hairpin RNA (shRNA). The hairpin is recognized and cleaved by Dicer, thus generating mature siRNA molecules.

[1325] In other embodiments, the siRNA molecules of the present disclosure can be encoded in plasmid vectors, AAV particles, viral genome or other nucleic acid expression vectors for delivery to a cell.

[1326] In some embodiments, a siRNA for inhibiting expression of SOD1 is provided, wherein said siRNA comprises a sense strand and an antisense strand, the antisense strand comprising a region of complementarity to a SOD1 RNA transcript, which antisense strand comprises at least 15 (e.g., at least 16, 17, 18, 19, 20, 21, 22, or 23) contiguous nucleotides differing by no more than 3 (e.g., by no more than 0, 1 or 2) nucleotides from an antisense sequence listed in any one of the duplexes in Table 10. In one embodiment, the antisense sequence comprises at least 15 (e.g., at least 16, 17, 18, 19, 20, 21, 22, or 23) contiguous nucleotides differing by no more than 3 (e.g., by no more than 0, 1 or 2) nucleotides from the antisense sequence of SEQ ID NO: 2507, 2363 or 2365.

[1327] Additional sense and antisense strand sequences useful for the siRNA duplexes of the present application are disclosed in PCT Patent Application Publications WO2016077687, WO2019079240, WO2018204786, WO2019079242, WO 2020010042 and WO2020223296, which are hereby incorporated by reference in their entirety.

[1328] In some embodiments, the siRNA duplexes or encoded dsRNA of the present disclosure suppress (or degrade) the SOD1 mRNA. Accordingly, the siRNA duplexes or encoded dsRNA can be used to substantially inhibit SOD1 in a cell, for example a neuron.

[1329] The expression of SOD1 may be assessed based on the level of expression of SOD1 mRNA, SOD1 protein, or the level of another parameter functionally linked to the level of expression of SOD1. In some embodiments, the expression of SOD1 is inhibited by at least 5%, at least 10%, at least 15%, at least 20%, at least 25%, at least 30%, at least 35%, at least 40%, at least 45%, at least 50%, at least 55%, at least 60%, at least 65%, at least 70%, at least 75%, at least 80%, at least 85%, at least 90%, or at least 95%. In some embodiments, the siRNA has an IC₅₀ in the range of 0.001-0.01 nM, 0.001-0.10 nM, 0.001-1.0 nM, 0.001-10 nM, 0.01-0.05 nM, 0.01-0.50 nM, 0.02-0.60 nM, 0.01-1.0 nM, 0.01-1.5 nM, 0.01-10 nM. The IC₅₀ value may be normalized relative to an appropriate control value, e.g., the IC₅₀ of a non-targeting siRNA. Accordingly, the protein product of SOD1 may be inhibited. In some embodiments, the siRNA duplexes or encoded dsRNA of the present disclosure suppress (or degrade) the target mRNA in spinal cord motor neurons (e.g., RNA in vg+ cells of motor neuron morphology).

[1330] According to the present disclosure, the siRNA molecules are designed and tested for their ability in reducing SOD1 mRNA levels in cultured cells. Such siRNA molecules may form a duplex such as, but not limited to, include those listed in Table 10. As a non-limiting example, the siRNA duplexes may be siRNA duplex ID D-4012, D-2968, or D-2959.

[1331] In some embodiments, the siRNA duplex comprises: (i) a sense strand sequence comprising SEQ ID NO: 2525, and an antisense strand sequence comprising SEQ ID NO: 2507; (ii) a sense strand sequence comprising SEQ ID NO: 2376, and an antisense strand sequence comprising SEQ ID NO: 2365; or (iii) a sense strand sequence comprising SEQ ID NO: 2381, and an antisense strand sequence comprising SEQ ID NO: 2363.

[1332] In some embodiments, the sense strand sequence and the antisense strand sequence comprise a region of complementarity, wherein the region of complementarity is between 17-20 nucleotides in length.

[1333] In certain embodiments, the siRNA molecules comprise a miRNA seed match for SOD1 located in the guide strand. In another embodiment, the siRNA molecules comprise a miRNA seed match for SOD1 located in the passenger strand. In yet another embodiment, the siRNA duplexes or encoded dsRNA targeting SOD1 gene do not comprise a seed match for SOD1 located in the guide or passenger strand.

[1334] In certain embodiments, the siRNA duplex target SOD1 is designed so there is no miRNA seed match for the sense or antisense sequence to the non-SOD1 sequence.

[1335] In some embodiments, the siRNA duplexes or encoded dsRNA targeting SOD1 may have almost no significant full-length off target effects for the guide strand, and/or for the passenger strand.

[1336] In certain embodiments, the siRNA duplexes or encoded dsRNA targeting SOD1 may have high activity in vitro. In another embodiment, the siRNA molecules may have low activity in vitro. In yet another embodiment, the siRNA duplexes or dsRNA targeting SOD1 may have high guide strand activity and low passenger strand activity in vitro.

[1337] In certain embodiments, the siRNA molecules have a high guide strand activity and low passenger strand activity in vitro. The target knock-down (KD) by the guide strand may be at least 40%, 50%, 60%, 65%, 70%, 75%, 80%, 85%, 90%, 95%, 99%, 99.5% or 100%. As a non-limiting example, the target knock-down may persist for a period of time of at least 4 weeks, at least 8 weeks, at least 12 weeks, or more. In some embodiments, the highest knock-down from delivery of the siRNA molecules is seen around the injection site(s). In some embodiments, knock-down is seen in the ventral horn and around the injection site(s) after delivery of the siRNA molecules.

[1338] In certain embodiments, the 5′ processing of the guide strand of the siRNA duplex targeting SOD1 has a correct start (n) at the 5′ end at least 75%, 80%, 85%, 90%, 95%, 99% or 100% of the time in vitro or in vivo. As a non-limiting example, the 5′ processing of the guide strand is precise and has a correct start (n) at the 5′ end at least 99% of the time in vitro. As a non-limiting example, the 5′ processing of the guide strand is precise and has a correct start (n) at the 5′ end at least 99% of the time in vivo. As a non-limiting example, the 5′ processing of the guide strand is precise and has a correct start (n) at the 5′ end at least 90% of the time in vitro. As a non-limiting example, the 5′ processing of the guide strand is precise and has a correct start (n) at the 5′ end at least 90% of the time in vivo. As a non-limiting example, the 5′ processing of the guide strand is precise and has a correct start (n) at the 5′ end at least 85% of the time in vitro. As a non-limiting example, the 5′ processing of the guide strand is precise and has a correct start (n) at the 5′ end at least 85% of the time in vivo.

[1339] In certain embodiments, the 5′ processing of the guide strand of the siRNA duplex targeting SOD1 has a correct start (n) at the 5′ end in a range of 75-95%, 75-90%, 75-85%, 75-80%, 80-95%, 80-90%, 80-85%, 85-95%, 85-90%, or 90-95%. As a non-limiting example, the 5′ processing of the guide strand of the siRNA duplex targeting SOD1 has a correct start (n) at the 5′ end in a range of 75-95%.

[1340] In certain embodiments, the guide to passenger (G:P) (also referred to as the antisense to sense) strand ratio expressed is 1:10, 1:9, 1:8, 1:7, 1:6, 1:5, 1:4, 1:3, 1:2, 1:1, 2:10, 2:9, 2:8, 2:7, 2:6, 2:5, 2:4, 2:3, 2:2, 2:1, 3:10, 3:9, 3:8, 3:7, 3:6, 3:5, 3:4, 3:3, 3:2, 3:1, 4:10, 4:9, 4:8, 4:7, 4:6, 4:5, 4:4, 4:3, 4:2, 4:1, 5:10, 5:9, 5:8, 5:7, 5:6, 5:5, 5:4, 5:3, 5:2, 5:1, 6:10, 6:9, 6:8, 6:7, 6:6, 6:5, 6:4, 6:3, 6:2, 6:1, 7:10, 7:9, 7:8, 7:7, 7:6, 7:5, 7:4, 7:3, 7:2, 7:1, 8:10, 8:9, 8:8, 8:7, 8:6, 8:5, 8:4, 8:3, 8:2, 8:1, 9:10, 9:9, 9:8, 9:7, 9:6, 9:5, 9:4, 9:3, 9:2, 9:1, 10:10, 10:9, 10:8, 10:7, 10:6, 10:5, 10:4, 10:3, 10:2, 10:1, 1:99, 5:95, 10:90, 15:85, 20:80, 25:75, 30:70, 35:65, 40:60, 45:55, 50:50, 55:45, 60:40, 65:35, 70:30, 75:25, 80:20, 85:15, 90:10, 95:5, or 99:1 in vitro or in vivo. The guide to passenger ratio refers to the ratio of the guide strands to the passenger strands after intracellular processing of the pri-microRNA. For example, an 80:20 guide-to-passenger ratio would have 8 guide strands to every 2 passenger strands processed from the precursor. As a non-limiting example, the guide-to-passenger strand ratio is 8:2 in vitro. As a non-limiting example, the guide-to-passenger strand ratio is 8:2 in vivo. As a non-limiting example, the guide-to-passenger strand ratio is 9:1 in vitro. As a non-limiting example, the guide-to-passenger strand ratio is 9:1 in vivo.

[1341] In certain embodiments, the guide to passenger (G:P) (also referred to as the antisense to sense) strand ratio expressed is greater than 1, greater than 2, greater than 5, greater than 10, greater than 20, greater than 50, or greater than 300.

[1342] In certain embodiments, the passenger to guide (P:G) (also referred to as the sense to antisense) strand ratio expressed is 1:10, 1:9, 1:8, 1:7, 1:6, 1:5, 1:4, 1:3, 1:2, 1:1, 2:10, 2:9, 2:8, 2:7, 2:6, 2:5, 2:4, 2:3, 2:2, 2:1, 3:10, 3:9, 3:8, 3:7, 3:6, 3:5, 3:4, 3:3, 3:2, 3:1, 4:10, 4:9, 4:8, 4:7, 4:6, 4:5, 4:4, 4:3, 4:2, 4:1, 5:10, 5:9, 5:8, 5:7, 5:6, 5:5, 5:4, 5:3, 5:2, 5:1, 6:10, 6:9, 6:8, 6:7, 6:6, 6:5, 6:4, 6:3, 6:2, 6:1, 7:10, 7:9, 7:8, 7:7, 7:6, 7:5, 7:4, 7:3, 7:2, 7:1, 8:10, 8:9, 8:8, 8:7, 8:6, 8:5, 8:4, 8:3, 8:2, 8:1, 9:10, 9:9, 9:8, 9:7, 9:6, 9:5, 9:4, 9:3, 9:2, 9:1, 10:10, 10:9, 10:8, 10:7, 10:6, 10:5, 10:4, 10:3, 10:2, 10:1, 1:99, 5:95, 10:90, 15:85, 20:80, 25:75, 30:70, 35:65, 40:60, 45:55, 50:50, 55:45, 60:40, 65:35, 70:30, 75:25, 80:20, 85:15, 90:10, 95:5, or 99:1 in vitro or in vivo. The passenger to guide ratio refers to the ratio of the passenger strands to the guide strands after the intracellular processing of the pri-microRNA. For example, an 80:20 of passenger-to-guide ratio would have 8 passenger strands to every 2 guide strands processed from the precursor. As a non-limiting example, the passenger-to-guide strand ratio is 80:20 in vitro. As a non-limiting example, the passenger-to-guide strand ratio is 80:20 in vivo. As a non-limiting example, the passenger-to-guide strand ratio is 8:2 in vitro. As a non-limiting example, the passenger-to-guide strand ratio is 8:2 in vivo. As a non-limiting example, the passenger-to-guide strand ratio is 9:1 in vitro. As a non-limiting example, the passenger-to-guide strand ratio is 9:1 in vivo.

[1343] In certain embodiments, the passenger to guide (P:G) (also referred to as the sense to antisense) strand ratio expressed is greater than 1, greater than 2, greater than 5, greater than 10, greater than 20, greater than 50, or greater than 300.

[1344] In certain embodiments, a passenger-guide strand duplex for SOD1 is considered effective when the pri- or pre-microRNAs demonstrate, buy methods known in the art and described herein, greater than 2-fold guide to passenger strand ratio when processing is measured. As a non-limiting examples, the pri- or pre-microRNAs demonstrate great than 2-fold, 3-fold, 4-fold, 5-fold, 6-fold, 7-fold, 8-fold, 9-fold, 10-fold, 11-fold, 12-fold, 13-fold, 14-fold, 15-fold, or 2 to 5-fold, 2 to 10-fold, 2 to 15-fold, 3 to 5-fold, 3 to 10-fold, 3 to 15-fold, 4 to 5-fold, 4 to 10-fold, 4 to 15-fold, 5 to 10-fold, 5 to 15-fold, 6 to 10-fold, 6 to 15-fold, 7 to 10-fold, 7 to 15-fold, 8 to 10-fold, 8 to 15-fold, 9 to 10-fold, 9 to 15-fold, 10 to 15-fold, 11 to 15-fold, 12 to 15-fold, 13 to 15-fold, or 14 to 15-fold guide to passenger strand ratio when processing is measured.

[1345] In certain embodiments, the percent of guide strands to the total endogenous pool of miRNAs is 0.001%, 0.002%, 0.003%, 0.004%, 0.005%, 0.006%, 0.007%, 0.008%, 0.009%, 0.01%, 0.02%, 0.03%, 0.04%, 0.05%, 0.06%, 0.07%, 0.08%, 0.09%, 0.1%, 0.2%, 0.3%, 0.4%, 0.5%, or 0.6%. As a non-limiting example, the percent is 0.06%. As a non-limiting example, the percent is 0.4%. As a non-limiting example, the percent is 0.5%. As a non-limiting example, the range is 0.06-0.6%. As a non-limiting example, the range is 0.4-0.5%.

[1346] In certain embodiments, the vector genome encoding the dsRNA comprises a sequence which is at least 60%, 65%, 70%, 75%, 80%, 85%, 90%, 95%, 99% or more than 99% of the full length of the construct. As a non-limiting example, the vector genome comprises a sequence which is at least 80% of the full-length sequence of the construct.

[1347] In certain embodiments, the siRNA molecules may be used to silence wild type or mutant version of the gene of interest by targeting at least one exon on the gene of interest sequence. The exon may be exon 1, exon 2, exon 3, exon 4, exon 5, exon 6, exon 7, exon 8, exon 9, exon 10, exon 11, exon 12, exon 13, exon 14, exon 15, exon 16, exon 17, exon 18, exon 19, exon 20, exon 21, exon 22, exon 23, exon 24, exon 25, exon 26, exon 27, exon 28, exon 29, exon 30, exon 31, exon 32, exon 33, exon 34, exon 35, exon 36, exon 37, exon 38, exon 39, exon 40, exon 41, exon 42, exon 43, exon 44, exon 45, exon 46, exon 47, exon 48, exon 49, exon 50, exon 51, exon 52, exon 53, exon 54, exon 55, exon 56, exon 57, exon 58, exon 59, exon 60, exon 61, exon 62, exon 63, exon 64, exon 65, exon 66, and/or exon 67.

siRNA Modification

[1348] In some embodiments, the siRNA molecules of the present disclosure, when not delivered as a precursor or DNA, may be chemically modified to modulate some features of RNA molecules, such as, but not limited to, increasing the stability of siRNAs in vivo. The chemically modified siRNA molecules can be used in human therapeutic applications, and are improved without compromising the RNAi activity of the siRNA molecules. As a non-limiting example, the siRNA molecules modified at both the 3′ and the 5′ end of both the sense strand and the antisense strand.

[1349] In some aspects, the siRNA duplexes of the present disclosure may contain one or more modified nucleotides such as, but not limited to, sugar modified nucleotides, nucleobase modifications and/or backbone modifications. In some aspects, the siRNA molecule may contain combined modifications, for example, combined nucleobase and backbone modifications.

[1350] In some embodiments, the modified nucleotide may be a sugar-modified nucleotide. Sugar modified nucleotides include, but are not limited to 2′-fluoro, 2′-amino and 2′-thio modified ribonucleotides, e.g. 2′-fluoro modified ribonucleotides. Modified nucleotides may be modified on the sugar moiety, as well as nucleotides having sugars or analogs thereof that are not ribosyl. For example, the sugar moieties may be, or be based on, mannoses, arabinoses, glucopyranoses, galactopyranoses, 4′-thioribose, and other sugars, heterocycles, or carbocycles.

[1351] In some embodiments, the modified nucleotide may be a nucleobase-modified nucleotide.

[1352] In some embodiments, the modified nucleotide may be a backbone-modified nucleotide. In some embodiments, the siRNA duplexes of the present disclosure may further comprise other modifications on the backbone. A normal “backbone”, as used herein, refers to the repeating alternating sugar-phosphate sequences in a DNA or RNA molecule. The deoxyribose/ribose sugars are joined at both the 3′-hydroxyl and 5′-hydroxyl groups to phosphate groups in ester links, also known as “phosphodiester” bonds/linker (PO linkage). The PO backbones may be modified as “phosphorothioate backbone (PS linkage). In some cases, the natural phosphodiester bonds may be replaced by amide bonds but the four atoms between two sugar units are kept. Such amide modifications can facilitate the solid phase synthesis of oligonucleotides and increase the thermodynamic stability of a duplex formed with siRNA complement. See e.g. Mesmaeker et al., Pure & Appl. Chem., 1997, 3, 437-440; the content of which is incorporated herein by reference in its entirety.

[1353] Modified bases refer to nucleotide bases such as, for example, adenine, guanine, cytosine, thymine, uracil, xanthine, inosine, and queuosine that have been modified by the replacement or addition of one or more atoms or groups. Some examples of modifications on the nucleobase moieties include, but are not limited to, alkylated, halogenated, thiolated, aminated, amidated, or acetylated bases, individually or in combination. More specific examples include, for example, 5-propynyluridine, 5-propynylcytidine, 6-methyladenine, 6-methylguanine, N,N,-dimethyladenine, 2-propyladenine, 2-propylguanine, 2-aminoadenine, 1-methylinosine, 3-methyluridine, 5-methylcytidine, 5-methyluridine and other nucleotides having a modification at the 5 position, 5-(2-amino)propyl uridine, 5-halocytidine, 5-halouridine, 4-acetylcytidine, 1-methyladenosine, 2-methyladenosine, 3-methylcytidine, 6-methyluridine, 2-methylguanosine, 7-methylguanosine, 2,2-dimethylguanosine, 5-methylaminoethyluridine, 5-methyloxyuridine, deazanucleotides such as 7-deaza-adenosine, 6-azouridine, 6-azocytidine, 6-azothymidine, 5-methyl-2-thiouridine, other thio bases such as 2-thiouridine and 4-thiouridine and 2-thiocytidine, dihydrouridine, pseudouridine, queuosine, archaeosine, naphthyl and substituted naphthyl groups, any O- and N-alkylated purines and pyrimidines such as N6-methyladenosine, 5-methylcarbonylmethyluridine, uridine 5-oxyacetic acid, pyridine-4-one, pyridine-2-one, phenyl and modified phenyl groups such as aminophenol or 2,4,6-trimethoxy benzene, modified cytosines that act as G-clamp nucleotides, 8-substituted adenines and guanines, 5-substituted uracils and thymines, azapyrimidines, carboxyhydroxyalkyl nucleotides, carboxyalkylaminoalkyl nucleotides, and alkylcarbonylalkylated nucleotides.

[1354] In certain embodiments, the modified nucleotides may be on just the sense strand, alternatively, the modified nucleotides may be on just the antisense strand, or the modified nucleotides may be in both the sense and antisense strands.

[1355] In some embodiments, the chemically modified nucleotide does not affect the ability of the antisense strand to pair with the target mRNA sequence.

[1356] In certain embodiments, the AAV particle comprising a nucleic acid sequence encoding the siRNA molecules of the present disclosure may encode siRNA molecules which are polycistronic molecules. The siRNA molecules may additionally comprise one or more linkers between regions of the siRNA molecules.

### Molecular Scaffold

[1357] In certain embodiments, the siRNA molecules may be encoded in a modulatory polynucleotide which also comprises a molecular scaffold. As used herein a “molecular scaffold” is a framework or starting molecule that forms the sequence or structural basis against which to design or make a subsequent molecule.

[1358] In certain embodiments, the molecular scaffold comprises at least one 5′ flanking region. As a non-limiting example, the 5′ flanking region may comprise a 5′ flanking sequence which may be of any length and may be derived in whole or in part from wild type microRNA sequence or be a completely artificial sequence.

[1359] In some embodiments, one or both of the 5′ and 3′ flanking sequences are absent.

[1360] In some embodiments the 5′ and 3′ flanking sequences are the same length.

[1361] In some embodiments the 5′ flanking sequence is from 1-10 nucleotides in length, from 5-15 nucleotides in length, from 10-30 nucleotides in length, from 20-50 nucleotides in length, greater than 40 nucleotides in length, greater than 50 nucleotides in length, greater than 100 nucleotides in length or greater than 200 nucleotides in length.

[1362] In some embodiments, the 5′ flanking sequence may be about 1, about 5, about 10, about 15, about 20, about 30, about 35, about 40, about 50, about 60, about 80, about 100, about 150, about 200, about 250, about 300, about 350, about 400, or about 500 nucleotides in length. In some embodiments, the 5′ flanking sequence is 30 nucleotides in length, 54 nucleotides in length, or 100 nucleotides in length.

[1363] In some embodiments the 3′ flanking sequence is from 1-10 nucleotides in length, from 5-15 nucleotides in length, from 10-30 nucleotides in length, from 20-50 nucleotides in length, greater than 40 nucleotides in length, greater than 50 nucleotides in length, greater than 100 nucleotides in length or greater than 200 nucleotides in length.

[1364] In some embodiments, the 3′ flanking sequence may be about 1, about 5, about 10, about 15, about 20, about 30, about 35, about 40, about 50, about 60, about 80, about 100, about 150, about 200, about 250, about 300, about 350, about 400, or about 500 nucleotides in length. In some embodiments, the 3′ flanking sequence is 35 nucleotides in length, 52 nucleotides in length, 99 nucleotides in length, or 100 nucleotides in length.

[1365] In some embodiments the 5′ and 3′ flanking sequences are the same sequence. In some embodiments they differ by 2%, 3%, 4%, 5%, 10%, 20% or more than 30% when aligned to each other. In some embodiments the 5′ and 3′ flanking regions may differ by no more than 5, 4, 3, 2 or 1 nucleotides from each other.

[1366] In certain embodiments, the molecular scaffold comprises at least one 3′ flanking region. As a non-limiting example, the 3′ flanking region may comprise a 3′ flanking sequence which may be of any length and may be derived in whole or in part from wild type microRNA sequence or be a completely artificial sequence.

[1367] In certain embodiments, the molecular scaffold comprises at least one loop motif region. As a non-limiting example, the loop motif region may comprise a sequence which may be of any length.

[1368] In certain embodiments, the molecular scaffold comprises a 5′ flanking region, a loop motif region and/or a 3′ flanking region.

[1369] In certain embodiments, at least one siRNA, miRNA or other RNAi agent described herein, may be encoded by a modulatory polynucleotide which may also comprise at least one molecular scaffold. The molecular scaffold may comprise a 5′ flanking sequence which may be of any length and may be derived in whole or in part from wild type microRNA sequence or be completely artificial. The 3′ flanking sequence may mirror the 5′ flanking sequence and/or a 3′ flanking sequence in size and origin. Either flanking sequence may be absent. The 3′ flanking sequence may optionally contain one or more CNNC motifs, where “N” represents any nucleotide.

[1370] Forming the stem of a stem loop structure is a minimum of the modulatory polynucleotide encoding at least one siRNA, miRNA or other RNAi agent described herein. In some embodiments, the siRNA, miRNA or other RNAi agent described herein comprises at least one nucleic acid sequence which is in part complementary or will hybridize to a target sequence. In some embodiments the payload is an siRNA molecule or fragment of an siRNA molecule.

[1371] In some embodiments, the 5′ arm of the stem loop structure of the modulatory polynucleotide comprises a nucleic acid sequence encoding a sense sequence. Non-limiting examples of sense sequences, or fragments or variants thereof, which may be encoded by the modulatory polynucleotide are described in Table 10. In some embodiments, the nucleic acid sequence encodes a sense sequence which comprises at least 15 (e.g., at least 16, 17, 18, 19, 20, 21, 22, or 23) contiguous nucleotides differing by no more than 3, 2 or 1 nucleotides from any one of the sense sequences in Table 10.

[1372] In some embodiments, the 3′ arm of the stem loop of the modulatory polynucleotide comprises a nucleic acid sequence encoding an antisense sequence. The antisense sequence, in some instances, comprises a “G” nucleotide at the 5′ most end. Non-limiting examples of antisense sequences, or fragments or variants thereof, which may be encoded by the modulatory polynucleotide are described in Table 10. In some embodiments, the nucleic acid sequence encodes an antisense sequence which comprises at least 15 (e.g., at least 16, 17, 18, 19, 20, 21, 22, or 23) contiguous nucleotides differing by no more than 3, 2 or 1 nucleotides from any one of the antisense sequences in Table 10.

[1373] In other embodiments, the sense sequence may reside on the 3′ arm while the antisense sequence resides on the 5′ arm of the stem of the stem loop structure of the modulatory polynucleotide. Non-limiting examples of sense and antisense sequences which may be encoded by the modulatory polynucleotide are described in Table 10.

[1374] In certain embodiments, the sense and antisense sequences may be completely complementary across a substantial portion of their length. In other embodiments the sense sequence and antisense sequence may be at least 70, 80, 90, 95 or 99% complementarity across independently at least 50, 60, 70, 80, 85, 90, 95, or 99% of the length of the strands. The sense strand sequence and an antisense strand sequence may be 100% complementary to each other, or alternatively, they may have 1, 2, 3, 4, or more mismatches. These mismatches may be contiguous, or alternatively, they may be non-contiguous throughout the sequence. In some embodiments, the mismatched nucleotides are located at the ends of the sequences. In some embodiments, the mismatched nucleotides of the sense and antisense sequence are on the 5′ end of the sequences. Alternatively, the mismatch may be on the 3′ end of the sense and antisense sequences.

[1375] Neither the identity of the sense sequence nor the homology of the antisense sequence need to be 100% complementarity to the target sequence.

[1376] In certain embodiments, separating the sense and antisense sequence of the stem loop structure of the modulatory polynucleotide is a loop sequence (also known as a loop motif, linker or linker motif). The loop sequence may be of any length, between 4-30 nucleotides, between 4-20 nucleotides, between 4-15 nucleotides, between 5-15 nucleotides, between 6-12 nucleotides, 6 nucleotides, 7 nucleotides, 8 nucleotides, 9 nucleotides, 10 nucleotides, 11 nucleotides, 12 nucleotides, 13 nucleotides, 14 nucleotides, and/or 15 nucleotides.

[1377] In some embodiments, the loop sequence comprises a nucleic acid sequence encoding at least one UGUG motif. In some embodiments, the nucleic acid sequence encoding the UGUG motif is located at the 5′ terminus of the loop sequence.

[1378] In certain embodiments, spacer regions may be present in the modulatory polynucleotide to separate one or more modules (e.g., 5′ flanking region, loop motif region, 3′ flanking region, sense sequence, antisense sequence) from one another. There may be one or more such spacer regions present.

[1379] In certain embodiments, a spacer region of between 8-20, i.e., 8, 9, 10, 11, 12, 13, 14, 15, 16, 17, 18, 19, or 20 nucleotides may be present between the sense sequence and a flanking region sequence.

[1380] In certain embodiments, the length of the spacer region is 13 nucleotides and is located between the 5′ terminus of the sense sequence and the 3′ terminus of the flanking sequence. In certain embodiments, a spacer is of sufficient length to form approximately one helical turn of the sequence.

[1381] In certain embodiments, a spacer region of between 8-20, i.e., 8, 9, 10, 11, 12, 13, 14, 15, 16, 17, 18, 19, or 20 nucleotides may be present between the antisense sequence and a flanking sequence.

[1382] In certain embodiments, the spacer sequence is between 10-13, i.e., 10, 11, 12 or 13 nucleotides and is located between the 3′ terminus of the antisense sequence and the 5′ terminus of a flanking sequence. In certain embodiments, a spacer is of sufficient length to form approximately one helical turn of the sequence.

[1383] In certain embodiments, the molecular scaffold of the modulatory polynucleotide comprises in the 5′ to 3′ direction, a 5′ flanking sequence, a 5′ arm, a loop motif, a 3′ arm and a 3′ flanking sequence. As a non-limiting example, the 5′ arm may comprise a nucleic acid sequence encoding a sense sequence and the 3′ arm comprises a nucleic acid sequence encoding the antisense sequence. In another non-limiting example, the 5′ arm comprises a nucleic acid sequence encoding the antisense sequence and the 3′ arm comprises a nucleic acid sequence encoding the sense sequence.

[1384] In certain embodiments, the 5′ arm, sense and/or antisense sequence, loop motif and/or 3′ arm sequence may be altered (e.g., substituting 1 or more nucleotides, adding nucleotides and/or deleting nucleotides). The alteration may cause a beneficial change in the function of the construct (e.g., increase knock-down of the target sequence, reduce degradation of the construct, reduce off target effect, increase efficiency of the payload, and reduce degradation of the payload).

[1385] In certain embodiments, the molecular scaffold of the modulatory polynucleotides is aligned in order to have the rate of excision of the guide strand (also referred to herein as the antisense strand) be greater than the rate of excision of the passenger strand (also referred to herein as the sense strand). The rate of excision of the guide or passenger strand may be, independently, 1%, 2%, 3%, 4%, 5%, 10%, 15%, 20%, 25%, 30%, 35%, 40%, 45%, 50%, 55%, 60%, 65%, 70%, 75%, 80%, 85%, 90%, 95%, 99% or more than 99%. As a non-limiting example, the rate of excision of the guide strand is at least 80%. As another non-limiting example, the rate of excision of the guide strand is at least 90%.

[1386] In certain embodiments, the rate of excision of the guide strand is greater than the rate of excision of the passenger strand. In one aspect, the rate of excision of the guide strand may be at least 1%, 2%, 3%, 4%, 5%, 10%, 15%, 20%, 25%, 30%, 35%, 40%, 45%, 50%, 55%, 60%, 65%, 70%, 75%, 80%, 85%, 90%, 95%, 99% or more than 99% greater than the passenger strand.

[1387] In certain embodiments, the efficiency of excision of the guide strand is at least 60%, 65%, 70%, 75%, 80%, 85%, 90%, 95%, 99% or more than 99%. As a non-limiting example, the efficiency of the excision of the guide strand is greater than 80%.

[1388] In certain embodiments, the efficiency of the excision of the guide strand is greater than the excision of the passenger strand from the molecular scaffold. The excision of the guide strand may be 2, 3, 4, 5, 6, 7, 8, 9, 10 or more than 10 times more efficient than the excision of the passenger strand from the molecular scaffold.

[1389] In certain embodiments, the molecular scaffold comprises a dual-function targeting modulatory polynucleotide. As used herein, a “dual-function targeting” modulatory polynucleotide is a polynucleotide where both the guide and passenger strands knock down the same target or the guide and passenger strands knock down different targets.

[1390] In certain embodiments, the molecular scaffold of the modulatory polynucleotides described herein may comprise a 5′ flanking region, a loop motif region and a 3′ flanking region. Non-limiting examples of the sequences for the 5′ flanking region, loop motif region (may also be referred to as a linker region) and the 3′ flanking region which may be used, or fragments thereof used, in the modulatory polynucleotides described herein are shown in Tables 11-13.

TABLE 11
5′ Flanking Regions for Molecular Scaffold

| 5′ | | 5′ |
|---|---|---|
| Flanking | | Flanking |
| Region | | Region |
| Name | 5′ Flanking Region Sequence | SEQ ID |
| 5F1 | CTCCCGCAGAACACCATGCGCTCCACGGAA | 2547 |
| 5F2 | GAAGCAAAGAAGGGGCAGAGGGAGCCCGTG | 2548 |
| | AGCTGAGTGGGCCAGGGACTGGGAGAAGGA | |
| | GTGAGGAGGCAGGGCCGGCATGCCTCTGCT | |
| | GCTGGCCAGA | |
| 5F3 | GTGCTGGGCGGGGGGCGGCGGGCCCTCCCG | 2549 |
| | CAGAACACCATGCGCTCTTCGGAA | |
| 5F4 | GTGCTGGGCGGGGGGCGGCGGGCCCTCCCG | 5014 |
| | CAGAACACCATGCGCTCCACGGAA | |

TABLE 12
Loop Motif Regions for Molecular Scaffold

| Loop Motif | Loop Motif Region | Loop Motif |
|---|---|---|
| Region Name | Sequence | Region SEQ ID |
| L1 | GTGGCCACTGAGAAG | 2550 |
| L2 | GTCTGCACCTGTCACTAG | 2551 |
| L3 | TGTGACCTGG | 2552 |
| L4 | TGTGATTTGG | 2553 |

TABLE 13
3′ Flanking Regions for Molecular Scaffold

| 3′ | | 3′ |
|---|---|---|
| Flanking | | Flanking |
| Region | | Region |
| Name | 3′ Flanking Region Sequence | SEQ ID |
| 3F1 | CTGAGGAGCGCCTTGACAGCAGCCATGGGAG | 2554 |
| | GGCC | |
| 3F2 | TGGCCGTGTAGTGCTACCCAGCGCTGGCTGCC | 2555 |
| | TCCTCAGCATTGCAATTCCTCTCCCATCTGGG | |
| | CACCAGTCAGCTACCCTGGTGGGAATCTGGGT | |
| | AGCC | |
| 3F3 | GGCCGTGTAGTGCTACCCAGCGCTGGCTGCCT | 2556 |
| | CCTCAGCATTGCAATTCCTCTCCCATCTGGGC | |
| | ACCAGTCAGCTACCCTGGTGGGAATCTGGGT | |
| | AGCC | |
| 3F4 | CTGAGGAGCGCCTTGACAGCAGCCATGGGAG | 2557 |
| | GGCCGCCCCCTACCTCAGTGA | |
| 3F5 | CTGTGGAGCGCCTTGACAGCAGCCATGGGAG | 2558 |
| | GGCCGCCCCCTACCTCAGTGA | |

[1391] In certain embodiments, the molecular scaffold may comprise at least one 5′ flanking region, fragment or variant thereof listed in Table 11. In some embodiments, the molecular scaffold may comprise a 5′ Flanking Region sequence which comprises at least 15 (e.g., at least 16, 17, 18, 19, 20, 21, 22, or 23) contiguous nucleotides differing by no more than 3, 2 or 1 nucleotides from any one of the 5′ Flanking Region sequences in Table 11. These differing nucleotides may be contiguous, or alternatively, they may be non-contiguous throughout the sequence. In some embodiments, the differing nucleotides are located at the ends of the sequences. As a non-limiting example, the 5′ flanking region may be 51F4. In some embodiments, the AAV particle includes nucleotide sequence of SEQ ID NO: 2547, 2548, 2549, or 5014, or a nucleotide sequence substantially identical (e.g., having at least 70%, 75%, 80%, 85%, 90%, 92%, 95%, 97%, 98%, or 99% sequence identity) thereto; or a nucleotide sequence having at least one, two, three, four, five, six, or seven modifications, but no more than ten modifications of SEQ ID NO: 2547, 2548, 2549, or 5014.

[1392] In certain embodiments, the molecular scaffold may comprise at least one 5F1 flanking region.

[1393] In certain embodiments, the molecular scaffold may comprise at least one loop motif region, fragment or variant thereof listed in Table 12. In some embodiments, the molecular scaffold may comprise a 3′ Flanking Region sequence which comprises at least 8 (e.g., at least 9, 10, 11, 12, 13, 14, or 15) contiguous nucleotides differing by no more than 3, 2 or 1 nucleotides from any one of the a 3′ Flanking Region sequences in Table 12. These differing nucleotides may be contiguous, or alternatively, they may be non-contiguous throughout the sequence. In some embodiments, the differing nucleotides are located at the ends of the sequences. In some embodiments, the AAV particle includes nucleotide sequence of SEQ ID NO: 2550, 2551, 2552, or 2553, or a nucleotide sequence substantially identical (e.g., having at least 70%, 75%, 80%, 85%, 90%, 92%, 95%, 97%, 98%, or 99% sequence identity) thereto; or a nucleotide sequence having at least one, two, three, or four, modifications, but no more than six modifications of SEQ ID NO: 2550, 2551, 2552, or 2553. As a non-limiting example, the loop motif region may be L1.

[1394] In certain embodiments, the molecular scaffold may comprise at least one L1 loop motif region.

[1395] In certain embodiments, the molecular scaffold may comprise at least one 3′ flanking region, fragment or variant thereof listed in Table 13. In some embodiments, the molecular scaffold may comprise a loop region sequence which comprises at least 15 (e.g., at least 16, 17, 18, 19, 20, 21, 22, or 23) contiguous nucleotides differing by no more than 3, 2 or 1 nucleotides from any one of the loop sequences in Table 12. These differing nucleotides may be contiguous, or alternatively, they may be non-contiguous throughout the sequence. In some embodiments, the differing nucleotides are located at the ends of the sequences. In some embodiments, the AAV particle includes nucleotide sequence of SEQ ID NO: 2554, 2555, 2556, 2557, or 2558, or a nucleotide sequence substantially identical (e.g., having at least 70%, 75%, 80%, 85%, 90%, 92%, 95%, 97%, 98%, or 99% sequence identity) thereto; or a nucleotide sequence having at least one, two, three, four, five, six, or seven modifications, but no more than ten modifications of SEQ ID NO: 2554, 2555, 2556, 2557, or 2558. As a non-limiting example, the 3′ flanking region may be 3F1.

[1396] In certain embodiments, the molecular scaffold may comprise at least one 3F1 flanking region.

[1397] In certain embodiments, the molecular scaffold may comprise at least one 5′ flanking region, fragment or variant thereof, and at least one loop motif region, fragment or variant thereof, as described in Tables 11 and 12. As a non-limiting example, the 5′ flanking region and the loop motif region may be 5F1 and L1.

[1398] In certain embodiments, the molecular scaffold may comprise at least one 3′ flanking region, fragment or variant thereof, and at least one motif region, fragment or variant thereof, as described in Tables 12 and 13. As a non-limiting example, the 3′ flanking region and the loop motif region may be 3F1 and L1.

[1399] In certain embodiments, the molecular scaffold may comprise at least one 5′ flanking region, fragment or variant thereof, and at least one 3′ flanking region, fragment or variant thereof, as described in Tables 11 and 13. As a non-limiting example, the flanking regions may be 5F1 and 3F1.

[1400] In certain embodiments, the molecular scaffold may comprise at least one 5′ flanking region, fragment or variant thereof, at least one loop motif region, fragment or variant thereof, and at least one 3′ flanking region as described in Tables 11-13. As a non-limiting example, the flanking and loop motif regions may be 5F1, L1 and 3F1.

[1401] In certain embodiments, the molecular scaffold may be a natural pri-miRNA scaffold. As a non-limiting example, the molecular scaffold may be a scaffold derived from the human miR155 scaffold.

[1402] In certain embodiments, the molecular scaffold may comprise one or more linkers known in the art. The linkers may separate regions or one molecular scaffold from another. As a non-limiting example, the molecular scaffold may be polycistronic.

[1403] Additional 5′ flanking region nucleotides, loop region nucleotides, and 3′ flanking region nucleotides that may be used in the molecular scaffold of the modulatory polynucleotides described herein are disclosed in PCT Patent Application Publications WO2016077687, WO2019079240, WO2018204786, WO2019079242, WO 2020010042 and WO202022329625, which are hereby incorporated by reference in their entirety.

Modulatory Polynucleotide Comprising Molecular Scaffold and siRNA Molecules Targeting SOD1

[1404] In certain embodiments, the modulatory polynucleotide may comprise 5′ and 3′ flanking regions, loop motif region, and nucleic acid sequences encoding sense sequence and antisense sequence as described in Table 14. In Table 14, the DNA sequence identifier for the passenger and guide strands are described as well as the 5′ and 3′ Flanking Regions and the Loop region (also referred to as the linker region). In Table 14, the “miR” component of the name of the sequence does not necessarily correspond to the sequence numbering of miRNA genes (e.g., VOYSOD1miR-102 is the name of the sequence and does not necessarily mean that miR-102 is part of the sequence).

TABLE 14
SOD1 Modulatory Polynucleotide Sequence Regions (5′ to 3′)

| Modulatory | SEQ | | |
|---|---|---|---|
| Polynucleotide | ID | | |
| Construct Name | NO | Description | Sequence |
| VOYSOD1miR104- | 2562 | 5′ Flanking to | CTCCCGCAGAACACCATGCGCTCCACGGAAGCAGGTCCTCA |
| 788.2 | | 3′ Flanking | CTTTAATGCTGTGGCCACTGAGAAGTATTAAAGTGAGGACC |
| | | | TGCTTCTGAGGAGCGCCTTGACAGCAGCCATGGGAGGGCC |
| | 2547 | 5′ Flanking | CTCCCGCAGAACACCATGCGCTCCACGGAA |
| | 2583 | Passenger | GCAGGTCCTCACTTTAATGCT |
| | 2550 | Loop | GTGGCCACTGAGAAG |
| | 2604 | Guide | TATTAAAGTGAGGACCTGCTT |
| | 2554 | 3′Flanking | CTGAGGAGCGCCTTGACAGCAGCCATGGGAGGGCC |
| VOYSOD1miR127- | 2579 | 5′ Flanking to | GAAGCAAAGAAGGGGCAGAGGGAGCCCGTGAGCTGAGTGGG |
| 860 | | 3′ Flanking | CCAGGGACTGGGAGAAGGAGTGAGGAGGCAGGGCCGGCATG |
| | | | CCTCTGCTGCTGGCCAGACCCCTTAACTCATTTGTTCCCGT |
| | | | CTGCACCTGTCACTAGTAACAGATGAGTTAAGGGGTTTGGC |
| | | | CGTGTAGTGCTACCCAGCGCTGGCTGCCTCCTCAGCATTGC |
| | | | AATTCCTCTCCCATCTGGGCACCAGTCAGCTACCCTGGTGG |
| | | | GAATCTGGGTAGCC |
| | 2548 | 5′ Flanking | GAAGCAAAGAAGGGGCAGAGGGAGCCCGTGAGCTGAGTGGG |
| | | | CCAGGGACTGGGAGAAGGAGTGAGGAGGCAGGGCCGGCATG |
| | | | CCTCTGCTGCTGGCCAGA |
| | 2600 | Passenger | CCCCTTAACTCATTTGTTCCC |
| | 2551 | Loop | GTCTGCACCTGTCACTAG |
| | 2621 | Guide | TAACAGATGAGTTAAGGGGTT |
| | 2555 | 3′Flanking | TGGCCGTGTAGTGCTACCCAGCGCTGGCTGCCTCCTCAGCA |
| | | | TTGCAATTCCTCTCCCATCTGGGCACCAGTCAGCTACCCTG |
| | | | GTGGGAATCTGGGTAGCC |
| VOYSOD1miR114- | 5022 | 5′ Flanking to | GTGCTGGGCGGGGGGCGGCGGGCCCTCCCGCAGAACACCAT |
| 861 | | 3′ Flanking | GCGCTCTTCGGAACCCTTAACTGATCTGTTAACCTGTGACC |
| | | | TGGTTAACAGATGAGTTAAGGGTTCTGTGGAGCGCCTTGAC |
| | | | AGCAGCCATGGGAGGGCCGCCCCCTACCTCAGTGA |
| | 2549 | 5′ Flanking | GTGCTGGGCGGGGGGCGGCGGGCCCTCCCGCAGAACACCAT |
| | | | GCGCTCTTCGGAA |
| | 5023 | Passenger | CCCTTAACTGATCTGTTAACC |
| | 2552 | Loop | TGTGACCTGG |
| | 5024 | Guide | TTAACAGATGAGTTAAGGGTT |
| | 2558 | 3′Flanking | CTGTGGAGCGCCTTGACAGCAGCCATGGGAGGGCCGCCCCC |
| | | | TACCTCAGTGA |
| VOYSOD1miR102- | 2559 | 5′ Flanking to | GTGCTGGGCGGGGGGCGGCGGGCCCTCCCGCAGAACACCAT |
| 788 | | 3′ Flanking | GCGCTCTTCGGAAGCAGGTCCTCACTTTAATGCCTGTGACC |
| | | | TGGGATTAAAGTGAGGACCTGCTTCTGAGGAGCGCCTTGAC |
| | | | AGCAGCCATGGGAGGGCCGCCCCCTACCTCAGTGA |
| | 2549 | 5′ Flanking | GTGCTGGGCGGGGGGCGGCGGGCCCTCCCGCAGAACACCAT |
| | | | GCGCTCTTCGGAA |
| | 2580 | Passenger | GCAGGTCCTCACTTTAATGCC |
| | 2552 | Loop | TGTGACCTGG |
| | 2601 | Guide | GATTAAAGTGAGGACCTGCTT |
| | 2557 | 3′Flanking | CTGAGGAGCGCCTTGACAGCAGCCATGGGAGGGCCGCCCCC |
| | | | TACCTCAGTGA |
| VOYSOD1miR102- | 2560 | 5′ Flanking to | GTGCTGGGCGGGGGGCGGCGGGCCCTCCCGCAGAACACCAT |
| 805c | | 3′ Flanking | GCGCTCTTCGGAAGGCAATGTGACTGCTGGCCCCTGTGACC |
| | | | TGGTGCCAGCAGTCACATTGCCTTCTGAGGAGCGCCTTGAC |
| | | | AGCAGCCATGGGAGGGCCGCCCCCTACCTCAGTGA |
| | 2549 | 5′ Flanking | GTGCTGGGCGGGGGGCGGCGGGCCCTCCCGCAGAACACCAT |
| | | | GCGCTCTTCGGAA |
| | 2581 | Passenger | GGCAATGTGACTGCTGGCCCC |
| | 2552 | Loop | TGTGACCTGG |
| | 2602 | Guide | TGCCAGCAGTCACATTGCCTT |
| | 2557 | 3′Flanking | CTGAGGAGCGCCTTGACAGCAGCCATGGGAGGGCCGCCCCC |
| | | | TACCTCAGTGA |
| VOYSOD1miR104- | 2561 | 5′ Flanking to | GTGCTGGGCGGGGGGCGGCGGGCCCTCCCGCAGAACACCAT |
| 788 | | 3′ Flanking | GCGCTCTTCGGAAGCAGGTCCTCACTTTAATTCCTGTGACC |
| | | | TGGGATTAAAGTGAGGACCTGCTTCTGAGGAGCGCCTTGAC |
| | | | AGCAGCCATGGGAGGGCCGCCCCCTACCTCAGTGA |
| | 2549 | 5′ Flanking | GTGCTGGGCGGGGGGCGG TCCCGCAGAACACCAT |
| | | | GCGCTCTTCGGAA |
| | 2582 | Passenger | GCAGGTCCTCACTTTAATTCC |
| | 2552 | Loop | TGTGACCTGG |
| | 2603 | Guide | GATTAAAGTGAGGACCTGCTT |
| | 2557 | 3′Flanking | CTGAGGAGCGCCTTGACAGCAGCCATGGGAGGGCCGCCCCC |
| | | | TACCTCAGTGA |
| VOYSOD1miR104- | 2563 | 5′ Flanking to | CTCCCGCAGAACACCATGCGCTCCACGGAACAGGTCCTCAC |
| 789 | | 3′ Flanking | TTTAATCGCTGTGGCCACTGAGAAGTGATTAAAGTGAGGAC |
| | | | CTGTTCTGAGGAGCGCCTTGACAGCAGCCATGGGAGGGCC |
| | 2547 | 5′ Flanking | CTCCCGCAGAACACCATGCGCTCCACGGAA |
| | 2584 | Passenger | CAGGTCCTCACTTTAATCGCT |
| | 2550 | Loop | GTGGCCACTGAGAAG |
| | 2605 | Guide | TGATTAAAGTGAGGACCTGTT |
| | 2554 | 3′Flanking | CTGAGGAGCGCCTTGACAGCAGCCATGGGAGGGCC |
| VOYSOD1miR104- | 2564 | 5′ Flanking to | GTGCTGGGCGGGGGGCGGCGGGCCCTCCCGCAGAACACCAT |
| 805c | | 3′ Flanking | GCGCTCTTCGGAAGGCAATGTGACTGCTGGTGCCTGTGACC |
| | | | TGGTGCCAGCAGTCACATTGCCTTCTGAGGAGCGCCTTGAC |
| | | | AGCAGCCATGGGAGGGCCGCCCCCTACCTCAGTGA |
| | 2549 | 5′ Flanking | GTGCTGGGCGGGGGGCGGCGGGC( CTCCCGCAGAACACCAT |
| | | | GCGCTCTTCGGAA |
| | 2585 | Passenger | GGCAATGTGACTGCTGGTGCC |
| | 2552 | Loop | TGTGACCTGG |
| | 2606 | Guide | TGCCAGCAGTCACATTGCCTT |
| | 2557 | 3′Flanking | CTGAGGAGCGCCTTGACAGCAGCCATGGGAGGGCCGCCCCC |
| | | | TACCTCAGTGA |
| VOYSOD1miR104- | 2565 | 5′ Flanking to | CTCCCGCAGAACACCATGCGCTCCACGGAAGTCGTTTGGCT |
| 829 | | 3′ Flanking | TGTGGTGGCTGTGGCCACTGAGAAGTCACCACAAGCCAAAC |
| | | | GACTTCTGAGGAGCGCCTTGACAGCAGCCATGGGAGGGCC |
| | 2547 | 5′ Flanking | CTCCCGCAGAACACCATGCGCTCCACGGAA |
| | 2586 | Passenger | GTCGTTTGGCTTGTGGTGGCT |
| | 2550 | Loop | GTGGCCACTGAGAAG |
| | 2607 | Guide | TCACCACAAGCCAAACGACTT |
| | 2554 | 3′Flanking | CTGAGGAGCGCCTTGACAGCAGCCATGGGAGGGCC |
| VOYSOD1miR104- | 2566 | 5′ Flanking to | CTCCCGCAGAACACCATGCGCTCCACGGAATCGTTTGGCTT |
| 830 | | 3′ Flanking | GTGGTGTGCTGTGGCCACTGAGAAGTACACCACAAGCCAAA |
| | | | CGATTCTGAGGAGCGCCTTGACAGCAGCCATGGGAGGGCC |
| | 2547 | 5′ Flanking | CTCCCGCAGAACACCATGCGCTCCACGGAA |
| | 2587 | Passenger | TCGTTTGGCTTGTGGTGTGCT |
| | 2550 | Loop | GTGGCCACTGAGAAG |
| | 2608 | Guide | TACACCACAAGCCAAACGATT |
| | 2554 | 3′Flanking | CTGAGGAGCGCCTTGACAGCAGCCATGGGAGGGCC |
| VOYSOD1miR109- | 2567 | 5′ Flanking to | GTGCTGGGCGGGGGGCGGCGGGCCCTCCCGCAGAACACCAT |
| 788 | | 3′Flanking | GCGCTCTTCGGAAGCAGGTCCTCACTTTAATCCCTGTGATT |
| | | | TGGGATTAAAGTGAGGACCTGCTTCTGAGGAGCGCCTTGAC |
| | | | AGCAGCCATGGGAGGGCCGCCCCCTACCTCAGTGA |
| | 2549 | 5′ Flanking | GTGCTGGGCGGGGGGCGGCGGGCCCTCCCGCAGAACACCAT |
| | | | GCGCTCTTCGGAA |
| | 2588 | Passenger | GCAGGTCCTCACTTTAATCCC |
| | 2553 | Loop | TGTGATTTGG |
| | 2609 | Guide | GATTAAAGTGAGGACCTGCTT |
| | 2557 | 3′ Flanking | CTGAGGAGCGCCTTGACAGCAGCCATGGGAGGGCCGCCCCC |
| | | | TACCTCAGTGA |
| VOYSOD1miR109- | 2568 | 5′ Flanking to | GTGCTGGGCGGGGGGCGGCGGGCCCTCCCGCAGAACACCAT |
| 805c | | 3′ Flanking | GCGCTCTTCGGAAGGCAATGTGACTGCTGGTACCTGTGATT |
| | | | TGGTGCCAGCAGTCACATTGCCTTCTGAGGAGCGCCTTGAC |
| | | | AGCAGCCATGGGAGGGCCGCCCCCTACCTCAGTGA |
| | 2549 | 5′ Flanking | GTGCTGGGCGGGGGGCGGCGGGCCCTCCCGCAGAACACCAT |
| | | | GCGCTCTTCGGAA |
| | 2589 | Passenger | GGCAATGTGACTGCTGGTACC |
| | 2553 | Loop | TGTGATTTGG |
| | 2610 | Guide | TGCCAGCAGTCACATTGCCTT |
| | 2557 | 3′Flanking | CTGAGGAGCGCCTTGACAGCAGCCATGGGAGGGCCGCCCCC |
| | | | TACCTCAGTGA |
| VOYSOD1miR114- | 2569 | 5′ Flanking to | GTGCTGGGCGGGGGGCGGCGGGCCCTCCCGCAGAACACCAT |
| 788 | | 3′ Flanking | GCGCTCTTCGGAAGCAGGTCCTGACTTTAATCCCTGTGACC |
| | | | TGGGATTAAAGTGAGGACCTGCTTCTGTGGAGCGCCTTGAC |
| | | | AGCAGCCATGGGAGGGCCGCCCCCTACCTCAGTGA |
| | 2549 | 5′ Flanking | GTGCTGGGCGGGGGGCGGCGGGCCCTCCCGCAGAACACCAT |
| | | | GCGCTCTTCGGAA |
| | 2590 | Passenger | GCAGGTCCTGACTTTAATCCC |
| | 2552 | Loop | TGTGACCTGG |
| | 2611 | Guide | GATTAAAGTGAGGACCTGCTT |
| | 2558 | 3′Flanking | CTGTGGAGCGCCTTGACAGCAGCCATGGGAGGGCCGCCCCC |
| | | | TACCTCAGTGA |
| VOYSOD1miR114- | 2570 | 5′ Flanking to | GTGCTGGGCGGGGGGCGGCGGGCCCTCCCGCAGAACACCAT |
| 805c | | 3′ Flanking | GCGCTCTTCGGAAGGCAATGTGTCTGCTGGTACCTGTGACC |
| | | | TGGTGCCAGCAGTCACATTGCCTTCTGTGGAGCGCCTTGAC |
| | | | AGCAGCCATGGGAGGGCCGCCCCCTACCTCAGTGA |
| | 2549 | 5′ Flanking | GTGCTGGGCGGGGGGCGGCGGGCCCTCCCGCAGAACACCAT |
| | | | GCGCTCTTCGGAA |
| | 2591 | Passenger | GGCAATGTGTCTGCTGGTACC |
| | 2552 | Loop | TGTGACCTGG |
| | 2612 | Guide | TGCCAGCAGTCACATTGCCTT |
| | 2558 | 3′Flanking | CTGTGGAGCGCCTTGACAGCAGCCATGGGAGGGCCGCCCCC |
| | | | TACCTCAGTGA |
| VOYSOD1miR116- | 2571 | 5′ Flanking to | GTGCTGGGCGGGGGGCGGCGGGCCCTCCCGCAGAACACCAT |
| 788 | | 3′ Flanking | GCGCTCTTCGGAAGCAGGTCCTCACTTTAATCCCTGTGACC |
| | | | TGGGATTAAAGTGAGGACCTGCTTCTGTGGAGCGCCTTGAC |
| | | | AGCAGCCATGGGAGGGCCGCCCCCTACCTCAGTGA |
| | 2549 | 5′ Flanking | GTGCTGGGCGGGGGGCGGCGGGCCCTCCCGCAGAACACCAT |
| | | | GCGCTCTTCGGAA |
| | 2592 | Passenger | GCAGGTCCTCACTTTAATCCC |
| | 2552 | Loop | TGTGACCTGG |
| | 2613 | Guide | GATTAAAGTGAGGACCTGCTT |
| | 2558 | 3′Flanking | CTGTGGAGCGCCTTGACAGCAGCCATGGGAGGGCCGCCCCC |
| | | | TACCTCAGTGA |
| VOYSOD1miR116- | 2572 | 5′ Flanking to | GTGCTGGGCGGGGGGCGGCGGGCCCTCCCGCAGAACACCAT |
| 805c | | 3′ Flanking | GCGCTCTTCGGAAGGCAATGTGACTGCTGGTACCTGTGACC |
| | | | TGGTGCCAGCAGTCACATTGCCTTCTGTGGAGCGCCTTGAC |
| | | | AGCAGCCATGGGAGGGCCGCCCCCTACCTCAGTGA |
| | 2549 | 5′ Flanking | GTGCTGGGCGGGGGGCGGCGGGCCCTCCCGCAGAACACCAT |
| | | | GCGCTCTTCGGAA |
| | 2593 | Passenger | GGCAATGTGACTGCTGGTACC |
| | 2552 | Loop | TGTGACCTGG |
| | 2614 | Guide | TGCCAGCAGTCACATTGCCTT |
| | 2558 | 3′Flanking | CTGTGGAGCGCCTTGACAGCAGCCATGGGAGGGCCGCCCCC |
| | | | TACCTCAGTGA |
| VOYSOD1miR127- | 2573 | 5′ Flanking to | GAAGCAAAGAAGGGGCAGAGGGAGCCCGTGAGCTGAGTGGG |
| 788 | | 3′ Flanking | CCAGGGACTGGGAGAAGGAGTGAGGAGGCAGGGCCGGCATG |
| | | | CCTCTGCTGCTGGCCAGAGCAGGTCCTCACTTTAATCCCGT |
| | | | CTGCACCTGTCACTAGGATTAAAGTGAGGACCTGCTTTGGC |
| | | | CGTGTAGTGCTACCCAGCGCTGGCTGCCTCCTCAGCATTGC |
| | | | AATTCCTCTCCCATCTGGGCACCAGTCAGCTACCCTGGTGG |
| | | | GAATCTGGGTAGCC |
| | 2548 | 5′ Flanking | GAAGCAAAGAAGGGGCAGAGGGAGCCCGTGAGCTGAGTGGG |
| | | | CCAGGGACTGGGAGAAGGAGTGAGGAGGCAGGGCCGGCATG |
| | | | CCTCTGCTGCTGGCCAGA |
| | 2594 | Passenger | GCAGGTCCTCACTTTAATCCC |
| | 2551 | Loop | GTCTGCACCTGTCACTAG |
| | 2615 | Guide | GATTAAAGTGAGGACCTGCTT |
| | 2555 | 3′Flanking | TGGCCGTGTAGTGCTACCCAGCGCTGGCTGCCTCCTCAGCA |
| | | | TTGCAATTCCTCTCCCATCTGGGCACCAGTCAGCTACCCTG |
| | | | GTGGGAATCTGGGTAGCC |
| VOYSOD1miR127- | 2574 | 5′ Flanking to | GAAGCAAAGAAGGGGCAGAGGGAGCCCGTGAGCTGAGTGGG |
| 788.2 | | 3′ Flanking | CCAGGGACTGGGAGAAGGAGTGAGGAGGCAGGGCCGGCATG |
| | | | CCTCTGCTGCTGGCCAGAGCAGGTCCTCACTTTAATGCCGT |
| | | | CTGCACCTGTCACTAGTATTAAAGTGAGGACCTGCTTTGGC |
| | | | CGTGTAGTGCTACCCAGCGCTGGCTGCCTCCTCAGCATTGC |
| | | | AATTCCTCTCCCATCTGGGCACCAGTCAGCTACCCTGGTGG |
| | | | GAATCTGGGTAGCC |
| | 2548 | 5′ Flanking | GAAGCAAAGAAGGGGCAGAGGGAGCCCGTGAGCTGAGTGGG |
| | | | CCAGGGACTGGGAGAAGGAGTGAGGAGGCAGGGCCGGCATG |
| | | | CCTCTGCTGCTGGCCAGA |
| | 2595 | Passenger | GCAGGTCCTCACTTTAATGCC |
| | 2551 | Loop | GTCTGCACCTGTCACTAG |
| | 2616 | Guide | TATTAAAGTGAGGACCTGCTT |
| | 2555 | 3′Flanking | TGGCCGTGTAGTGCTACCCAGCGCTGGCTGCCTCCTCAGCA |
| | | | TTGCAATTCCTCTCCCATCTGGGCACCAGTCAGCTACCCTG |
| | | | GTGGGAATCTGGGTAGCC |
| VOYSOD1miR127- | 2575 | 5′ Flanking to | GAAGCAAAGAAGGGGCAGAGGGAGCCCGTGAGCTGAGTGGG |
| 789 | | 3′ Flanking | CCAGGGACTGGGAGAAGGAGTGAGGAGGCAGGGCCGGCATG |
| | | | CCTCTGCTGCTGGCCAGACAGGTCCTCACTTTAATCGCCGT |
| | | | CTGCACCTGTCACTAGTGATTAAAGTGAGGACCTGTTTGGC |
| | | | CGTGTAGTGCTACCCAGCGCTGGCTGCCTCCTCAGCATTGC |
| | | | AATTCCTCTCCCATCTGGGCACCAGTCAGCTACCCTGGTGG |
| | | | GAATCTGGGTAGCC |
| | 2548 | 5′ Flanking | GAAGCAAAGAAGGGGCAGAGGGAGCCCGTGAGCTGAGTGGG |
| | | | CCAGGGACTGGGAGAAGGAGTGAGGAGGCAGGGCCGGCATG |
| | | | CCTCTGCTGCTGGCCAGA |
| | 2596 | Passenger | CAGGTCCTCACTTTAATCGCC |
| | 2551 | Loop | GTCTGCACCIGTCACTAG |
| | 2617 | Guide | TGATTAAAGTGAGGACCTGTT |
| | 2555 | 3′Flanking | TGGCCGTGTAGTGCTACCCAGCGCTGGCTGCCTCCTCAGCA |
| | | | TTGCAATTCCTCTCCCATCTGGGCACCAGTCAGCTACCCTG |
| | | | GTGGGAATCTGGGTAGCC |
| VOYSOD1miR127- | 2576 | 5′ Flanking to | GAAGCAAAGAAGGGGCAGAGGGAGCCCGTGAGCTGAGTGGG |
| 805c | | 3′ Flanking | CCAGGGACTGGGAGAAGGAGTGAGGAGGCAGGGCCGGCATG |
| | | | CCTCTGCTGCTGGCCAGAGGCAATGTGACTGCTGGTACCGT |
| | | | CTGCACCTGTCACTAGTGCCAGCAGTCACATTGCCTTTGGC |
| | | | CGTGTAGTGCTACCCAGCGCTGGCTGCCTCCTCAGCATTGC |
| | | | AATTCCTCTCCCATCTGGGCACCAGTCAGCTACCCTGGTGG |
| | | | GAATCTGGGTAGCC |
| | 2548 | 5′ Flanking | GAAGCAAAGAAGGGGCAGAGGGAGCCCGTGAGCTGAGTGGG |
| | | | CCAGGGACTGGGAGAAGGAGTGAGGAGGCAGGGCCGGCATG |
| | | | CCTCTGCTGCTGGCCAGA |
| | 2597 | Passenger | GGCAATGTGACTGCTGGTACC |
| | 2551 | Loop | GTCTGCACCTGTCACTAG |
| | 2618 | Guide | TGCCAGCAGTCACATTGCCTT |
| | 2555 | 3′Flanking | TGGCCGTGTAGTGCTACCCAGCGCTGGCTGCCTCCTCAGCA |
| | | | TTGCAATTCCTCTCCCATCTGGGCACCAGTCAGCTACCCTG |
| | | | GTGGGAATCTGGGTAGCC |
| VOYSOD1miR127- | 2577 | 5′ Flanking to | GAAGCAAAGAAGGGGCAGAGGGAGCCCGTGAGCTGAGTGGG |
| 829 | | 3′ Flanking | CCAGGGACTGGGAGAAGGAGTGAGGAGGCAGGGCCGGCATG |
| | | | CCTCTGCTGCTGGCCAGAGTCGTTTGGCTTGTGGTGGCCGT |
| | | | CTGCACCTGTCACTAGTCACCACAAGCCAAACGACTTTGGC |
| | | | CGTGTAGTGCTACCCAGCGCTGGCTGCCTCCTCAGCATTGC |
| | | | AATTCCTCTCCCATCTGGGCACCAGTCAGCTACCCTGGTGG |
| | | | GAATCTGGGTAGCC |
| | 2548 | 5′ Flanking | GAAGCAAAGAAGGGGCAGAGGGAGCCCGTGAGCTGAGTGGG |
| | | | CCAGGGACTGGGAGAAGGAGTGAGGAGGCAGGGCCGGCATG |
| | | | CCTCTGCTGCTGGCCAGA |
| | 2598 | Passenger | GTCGTTTGGCTTGTGGTGGCC |
| | 2551 | Loop | GTCTGCACCTGTCACTAG |
| | 2619 | Guide | TCACCACAAGCCAAACGACTTT |
| | 2556 | 3′Flanking | GGCCGTGTAGTGCTACCCAGCGCTGGCTGCCTCCTCAGCAT |
| | | | TGCAATTCCTCTCCCATCTGGGCACCAGTCAGCTACCCTGG |
| | | | TGGGAATCTGGGTAGCC |
| VOYSOD1miR127- | 2578 | 5′ Flanking to | GAAGCAAAGAAGGGGCAGAGGGAGCCCGTGAGCTGAGTGGG |
| 830 | | 3′ Flanking | CCAGGGACTGGGAGAAGGAGTGAGGAGGCAGGGCCGGCATG |
| | | | CCTCTGCTGCTGGCCAGATCGTTTGGCTTGTGGTGTGCCGT |
| | | | CTGCACCTGTCACTAGTACACCACAAGCCAAACGATTTGGC |
| | | | CGTGTAGTGCTACCCAGCGCTGGCTGCCTCCTCAGCATTGC |
| | | | AATTCCTCTCCCATCTGGGCACCAGTCAGCTACCCTGGTGG |
| | | | GAATCTGGGTAGCC |
| | 2548 | 5′ Flanking | GAAGCAAAGAAGGGGCAGAGGGAGCCCGTGAGCTGAGTGGG |
| | | | CCAGGGACTGGGAGAAGGAGTGAGGAGGCAGGGCCGGCATG |
| | | | CCTCTGCTGCTGGCCAGA |
| | 2599 | Passenger | TCGTTTGGCTTGTGGTGTGCC |
| | 2551 | Loop | GTCTGCACCTGTCACTAG |
| | 2620 | Guide | TACACCACAAGCCAAACGATT |
| | 2555 | 3′Flanking | TGGCCGTGTAGTGCTACCCAGCGCTGGCTGCCTCCTCAGCA |
| | | | TTGCAATTCCTCTCCCATCTGGGCACCAGTCAGCTACCCTG |
| | | | GTGGGAATCTGGGTAGCC |

[1405] In some embodiments, the molecular scaffold may comprise a 5′ Flanking to 3′ Flanking Region sequence which comprises at least 20 (e.g., at least 21, 22, 23, 24, 25, 26, 27, 28, 29, or 30) contiguous nucleotides differing by no more than 5, 4, 3, 2 or 1 nucleotides from any one of the 5′ Flanking to 3′ Flanking Region sequences in Table 14. These differing nucleotides may be contiguous, or alternatively, they may be non-contiguous throughout the sequence. In some embodiments, the differing nucleotides are located at the ends of the sequences. In some embodiments, the nucleotide sequence encoding the siRNA duplex comprises the nucleotide sequence of any one of SEQ ID NOs: 2562, 2579, 5022, 2559, 2560, 2561, 2563, 2564, 2565, 2566, 2567, 2568, 2569, 2570, 2571, 2572, 2573, 2574, 2575, 2576, 2577, 2578 or a nucleotide sequence at least 70% (e.g., at least 75%, 80%, 85%, 90%, 92%, 95%, 97%, 98%, or 99%) identical thereto.

[1406] In some embodiments, the molecular scaffold may comprise a 5′ Flanking Region sequence which comprises at least 15 (e.g., at least 16, 17, 18, 19, 20, 21, 22, or 23) contiguous nucleotides differing by no more than 3, 2 or 1 nucleotides from any one of the 5′ Flanking Region sequences in Table 14. These differing nucleotides may be contiguous, or alternatively, they may be non-contiguous throughout the sequence. In some embodiments, the differing nucleotides are located at the ends of the sequences. In some embodiments, the 5′ Flanking Region includes a nucleotide from any one of the 5′ Flanking Region sequences in Table 14, or a nucleotide sequence substantially identical (e.g., having at least 70%, 75%, 80%, 85%, 90%, 92%, 95%, 97%, 98%, or 99% sequence identity) thereto.

[1407] In some embodiments, the molecular scaffold may comprise a passenger sequence which comprises at least 15 (e.g., at least 16, 17, 18, 19, 20, 21, 22, or 23) contiguous nucleotides differing by no more than 3, 2 or 1 nucleotides from any one of the passenger sequences in Table 14. These differing nucleotides may be contiguous, or alternatively, they may be non-contiguous throughout the sequence. In some embodiments, the differing nucleotides are located at the ends of the sequences. In some embodiments, the passenger sequence includes a nucleotide from any one of the passenger sequences in Table 14, or a nucleotide sequence substantially identical (e.g., having at least 70%, 75%, 80%, 85%, 90%, 92%, 95%, 97%, 98%, or 99% sequence identity) thereto.

[1408] In some embodiments, the molecular scaffold may comprise a loop sequence which comprises at least 7 (e.g., at least 8, 9, or 10) contiguous nucleotides differing by no more than 3, 2 or 1 nucleotides from any one of the Loop sequences in Table 14. These differing nucleotides may be contiguous, or alternatively, they may be non-contiguous throughout the sequence. In some embodiments, the differing nucleotides are located at the ends of the sequences. In some embodiments, the loop sequence includes a nucleotide from any one of the loop sequences in Table 14, or a nucleotide sequence substantially identical (e.g., having at least 70%, 75%, 80%, 85%, 90%, 92%, 95%, 97%, 98%, or 99% sequence identity) thereto.

[1409] In some embodiments, the molecular scaffold may comprise a guide sequence which comprises at least 15 (e.g., at least 16, 17, 18, 19, 20, 21, 22, or 23) contiguous nucleotides differing by no more than 3, 2 or 1 nucleotides from any one of the guide sequences in Table 14. These differing nucleotides may be contiguous, or alternatively, they may be non-contiguous throughout the sequence. In some embodiments, the differing nucleotides are located at the ends of the sequences. In some embodiments, the guide sequence includes a nucleotide from any one of the guide sequences in Table 14, or a nucleotide sequence substantially identical (e.g., having at least 70%, 75%, 80%, 85%, 90%, 92%, 95%, 97%, 98%, or 99% sequence identity) thereto.

[1410] In some embodiments, the molecular scaffold may comprise a 3′ Flanking Region sequence which comprises at least 15 (e.g., at least 16, 17, 18, 19, 20, 21, 22, or 23) contiguous nucleotides differing by no more than 3, 2 or 1 nucleotides from any one of the 3′ Flanking Region sequences in Table 14. These differing nucleotides may be contiguous, or alternatively, they may be non-contiguous throughout the sequence. In some embodiments, the differing nucleotides are located at the ends of the sequences. In some embodiments, the 3′ Flanking Region sequence includes a nucleotide from any one of the 3′ Flanking Region sequences in Table 14, or a nucleotide sequence substantially identical (e.g., having at least 70%, 75%, 80%, 85%, 90%, 92%, 95%, 97%, 98%, or 99% sequence identity) thereto.

### AAV Particles Comprising Modulatory Polynucleotides

[1411] In certain embodiments, the AAV particle comprises a viral genome with a payload region comprising a modulatory polynucleotide sequence. In such an embodiment, a viral genome encoding more than one polypeptide may be replicated and packaged into a viral particle. A target cell transduced with a viral particle comprising a modulatory polynucleotide may express the encoded sense and/or antisense sequences in a single cell.

[1412] In some embodiments, the AAV particles are useful in the field of medicine for the treatment, prophylaxis, palliation or amelioration of neurological diseases and/or disorders.

[1413] In certain embodiments, the AAV particles comprising modulatory polynucleotide sequence which comprises a nucleic acid sequence encoding at least one siRNA molecule may be introduced into mammalian cells.

[1414] Where the AAV particle payload region comprises a modulatory polynucleotide, the modulatory polynucleotide may comprise sense and/or antisense sequences to knock down a target gene. The AAV viral genomes encoding modulatory polynucleotides described herein may be useful in the fields of human disease, viruses, infections veterinary applications and a variety of in vivo and in vitro settings.

[1415] In certain embodiments, the AAV particle viral genome may comprise at least one inverted terminal repeat (ITR) region. The length of the ITR region for the viral genome may be 75-80, 75-85, 75-100, 80-85, 80-90, 80-105, 85-90, 85-95, 85-110, 90-95, 90-100, 90-115, 95-100, 95-105, 95-120, 100-105, 100-110, 100-125, 105-110, 105-115, 105-130, 110-115, 110-120, 110-135, 115-120, 115-125, 115-140, 120-125, 120-130, 120-145, 125-130, 125-135, 125-150, 130-135, 130-140, 130-155, 135-140, 135-145, 135-160, 140-145, 140-150, 140-165, 145-150, 145-155, 145-170, 150-155, 150-160, 150-175, 155-160, 155-165, 160-165, 160-170, 165-170, 165-175, and 170-175 nucleotides. As a non-limiting example, the viral genome comprises an ITR that is about 105 nucleotides in length. As a non-limiting example, the viral genome comprises an ITR that is about 141 nucleotides in length. As a non-limiting example, the viral genome comprises an ITR that is about 130 nucleotides in length.

[1416] In some embodiments, the AAV particle viral genome may comprises one or more inverted terminal repeat (ITR) regions. In some embodiments, the AAV particle includes one ITR region. In some embodiments, the AAV particle includes two ITR sequence regions. As a non-limiting example, the viral genome comprises an ITR that is about 105 nucleotides in length and 141 nucleotides in length. As a non-limiting example, the viral genome comprises an ITR that is about 105 nucleotides in length and 130 nucleotides in length. As a non-limiting example, the viral genome comprises an ITR that is about 130 nucleotides in length and 141 nucleotides in length.

[1417] In certain embodiments, the AAV particle viral genome may comprise at least one multiple filler sequence region. As a non-limiting example, the viral genome comprises a filler region that is about 55 nucleotides in length. As a non-limiting example, the viral genome comprises a filler region that is about 56 nucleotides in length. As a non-limiting example, the viral genome comprises a filler region that is about 97 nucleotides in length. As a non-limiting example, the viral genome comprises a filler region that is about 103 nucleotides in length. As a non-limiting example, the viral genome comprises a filler region that is about 105 nucleotides in length. As a non-limiting example, the viral genome comprises a filler region that is about 357 nucleotides in length. As a non-limiting example, the viral genome comprises a filler region that is about 363 nucleotides in length. As a non-limiting example, the viral genome comprises a filler region that is about 712 nucleotides in length. As a non-limiting example, the viral genome comprises a filler region that is about 714 nucleotides in length. As a non-limiting example, the viral genome comprises a filler region that is about 1203 nucleotides in length. As a non-limiting example, the viral genome comprises a filler region that is about 1209 nucleotides in length. As a non-limiting example, the viral genome comprises a filler region that is about 1512 nucleotides in length. As a non-limiting example, the viral genome comprises a filler region that is about 1519 nucleotides in length. As a non-limiting example, the viral genome comprises a filler region that is about 2395 nucleotides in length. As a non-limiting example, the viral genome comprises a filler region that is about 2403 nucleotides in length. As a non-limiting example, the viral genome comprises a filler region that is about 2405 nucleotides in length. As a non-limiting example, the viral genome comprises a filler region that is about 3013 nucleotides in length. As a non-limiting example, the viral genome comprises a filler region that is about 3021 nucleotides in length.

[1418] In certain embodiments, the AAV particle viral genome may comprise at least one enhancer sequence region. The length of the enhancer region for the viral genome may be 300-310, 300-325, 305-315, 310-320, 315-325, 320-330, 325-335, 325-350, 330-340, 335-345, 340-350, 345-355, 350-360, 350-375, 355-365, 360-370, 365-375, 370-380, 375-385, 375-400, 380-390, 385-395, and 390-400 nucleotides. As a non-limiting example, the viral genome comprises an enhancer region that is about 303 nucleotides in length. As a non-limiting example, the viral genome comprises an enhancer region that is about 382 nucleotides in length.

[1419] In certain embodiments, the AAV particle viral genome may comprise at least one exon sequence region. The exon region(s) may, independently, have a length such as, but not limited to, 2, 3, 4, 5, 6, 7, 8, 9, 10, 11, 12, 13, 14, 15, 16, 17, 18, 19, 20, 21, 22, 23, 24, 25, 26, 27, 28, 29, 30, 31, 32, 33, 34, 35, 36, 37, 38, 39, 40, 41, 42, 43, 44, 45, 46, 47, 48, 49, 50, 51, 52, 53, 54, 55, 56, 57, 58, 59, 60, 61, 62, 63, 64, 65, 66, 67, 68, 69, 70, 71, 72, 73, 74, 75, 76, 77, 78, 79, 80, 81, 82, 83, 84, 85, 86, 87, 88, 89, 90, 91, 92, 93, 94, 95, 96, 97, 98, 99, 100, 101, 102, 103, 104, 105, 106, 107, 108, 109, 110, 111, 112, 113, 114, 115, 116, 117, 118, 119, 120, 121, 122, 123, 124, 125, 126, 127, 128, 129, 130, 131, 132, 133, 134, 135, 136, 137, 138, 139, 140, 141, 142, 143, 144, 145, 146, 147, 148, 149, and 150 nucleotides. The length of the exon region for the viral genome may be 2-10, 5-10, 5-15, 10-20, 10-30, 10-40, 15-20, 15-25, 20-30, 20-40, 20-50, 25-30, 25-35, 30-40, 30-50, 30-60, 35-40, 35-45, 40-50, 40-60, 40-70, 45-50, 45-55, 50-60, 50-70, 50-80, 55-60, 55-65, 60-70, 60-80, 60-90, 65-70, 65-75, 70-80, 70-90, 70-100, 75-80, 75-85, 80-90, 80-100, 80-110, 85-90, 85-95, 90-100, 90-110, 90-120, 95-100, 95-105, 100-110, 100-120, 100-130, 105-110, 105-115, 110-120, 110-130, 110-140, 115-120, 115-125, 120-130, 120-140, 120-150, 125-130, 125-135, 130-140, 130-150, 135-140, 135-145, 140-150, and 145-150 nucleotides. As a non-limiting example, the viral genome comprises an exon region that is about 53 nucleotides in length. As a non-limiting example, the viral genome comprises an exon region that is about 134 nucleotides in length.

[1420] In certain embodiments, the AAV particle viral genome may comprise at least one intron sequence region. The intron region(s) may, independently, be 100-500 nucleotides in length. The intron may have a length of 80, 90, 100, 110, 120, 130, 140, 150, 160, 170, 171, 172, 173, 174, 175, 176, 177, 178, 179, 180, 190, 200, 210, 220, 230, 240, 250, 260, 270, 280, 290, 300, 310, 320, 330, 340, 350, 360, 370, 380, 390, 400, 410, 420, 430, 440, 450, 460, 470, 480, 490 or 500 nucleotides. The intron may have a length between 80-100, 80-120, 80-140, 80-160, 80-180, 80-200, 80-250, 80-300, 80-350, 80-400, 80-450, 80-500, 200-300, 200-400, 200-500, 300-400, 300-500, or 400-500 nucleotides. As a non-limiting example, the viral genome comprises an intron region that is about 32 nucleotides in length. As a non-limiting example, the viral genome comprises an intron region that is about 172 nucleotides in length. As a non-limiting example, the viral genome comprises an intron region that is about 201 nucleotides in length. As a non-limiting example, the viral genome comprises an intron region that is about 347 nucleotides in length.

[1421] In certain embodiments, the AAV particle viral genome may comprise at least one polyadenylation signal sequence region. The polyadenylation signal region sequence region(s) may, independently, have a length such as, but not limited to, about 100-600 nucleotides, e.g., about 100-500 nucleotides, about 100-400 nucleotides, about 100-300 nucleotides, about 100-200 nucleotides, about 200-600 nucleotides, about 200-500 nucleotides, about 200-400 nucleotides, about 200-300 nucleotides, about 300-600 nucleotides, about 300-500 nucleotides, about 300-400 nucleotides, about 400-600 nucleotides, about 400-500 nucleotides, or about 500-600 nucleotides. In some embodiments, the polyA signal region comprises a length of about 100 to 150 nucleotides, e.g., about 127 nucleotides. As a non-limiting example, the viral genome comprises a polyadenylation signal sequence region that is about 225 nucleotides in length. As a non-limiting example, the viral genome comprises a polyadenylation signal sequence region that is about 476 nucleotides in length. In some embodiments, the polyA sequence comprises a length of about 450 to 500 nucleotides, e.g., about 477 nucleotides. In some embodiments, the polyA sequence comprises a length of about 520 to about 560 nucleotides, e.g., about 552 nucleotides.

[1422] In certain embodiments, the AAV particle viral genome comprises more than one polyA signal sequence region.

[1423] Additional ITR region nucleotides, filler region nucleotides, enhancer region nucleotides, exon and intron region nucleotides, and polyA signal sequence nucleotides that may be used in the transgenes encoding the SOD1 targeting polynucleotide described herein are disclosed in PCT Patent Application Publications WO2016077687, WO2019079240, WO2018204786, WO2019079242, WO 2020010042 and WO2020223296, which are hereby incorporated by reference in their entirety

[1424] Non-limiting examples of ITR to ITR sequences of AAV particles comprising a viral genome with a payload region comprising a modulatory polynucleotide sequence are described in Table 15. Table 15 also provides an alternate name for the ITR to ITR construct indicated by the “VOYSOD” identifier.

TABLE 15
ITR to ITR Sequences of AAV Particles, H1.mir.104-788.2 (with lentivirus derived
filler) comprising Modulatory Polynucleotides

| ITR to ITR | | SEQ | |
|---|---|---|---|
| Construct | | ID | |
| Name | Region | NO | Sequence |
| H1.mir.104- | ITR-ITR | 109 | CTGCGCGCTCGCTCGCTCACTGAGGCCGCCCGGGCAAAGCCCGGG |
| 788.2 with | sequence | | CGTCGGGCGACCTTTGGTCGCCCGGCCTCAGTGAGCGAGCGAGCG |
| lentivirus | | | CGCAGAGAGGGAGTGTAGCCATGCTCTAGGAAGATCAATTCAATT |
| derived filler | | | CACGCGTCCATGGCTTAGAAGGCAAGAATCCTGGCTGTGGAAAGA |
| (VOYSOD16) | | | TACCTAAAGGATCAACAGCTCCTGGGGATTTGGGGTTGCTCTGGA |
| | | | AAACTCATTTGCACCACTGCTGTGCCTTGGAATGCTAGTTGGAGT |
| | | | AATAAATCTCTGGAACAGATTTGGAATCACACGACCTGGATGGAG |
| | | | TGGGACAGAGAAATTAACAATTACACAAGCTTAATACACTCCTTA |
| | | | ATTGAAGAATCGCAAAACCAGCAAGAAAAGAATGAACAAGAATTA |
| | | | TTGGAATTAGATAAATGGGCAAGTTTGTGGAATTGGTTTAACATA |
| | | | ACAAATTGGCTGTGGTATATAAAATTATTCATAATGATAGTAGGA |
| | | | GGCTTGGTAGGTTTAAGAATAGTTTTTGCTGTACTTTCTATAGTG |
| | | | AATAGAGTTAGGCAGGGATATTCACCATTATCGTTTCAGACCCAC |
| | | | CTCCCAACCCCGAGGGGACCCGACAGGCCCGAAGGAATAGAAGAA |
| | | | GAAGGTGGAGAGAGAGACAGAGACAGATCCATTCGATTAGTGAAC |
| | | | GGATCTCGACGGTATCGATCACGAGACTAGCCTCGAGCGGCCGCA |
| | | | ATTCGAACGCTGACGTCATCAACCCGCTCCAAGGAATCGCGGGCC |
| | | | CAGTGTCACTAGGCGGGAACACCCAGCGCGCGTGCGCCCTGGCAG |
| | | | GAAGATGGCTGTGAGGGACAGGGAGTGGCGCCCTGCAATATTTGC |
| | | | ATGTCGCTATGTGTTCTGGGAAATCACCATAAACGTGAAATGTCT |
| | | | TTGGATTTGGGAATCTTATAAGTTCTGTATGAGACCACACCGGTA |
| | | | CCGAGCTCTCCCGCAGAACACCATGCGCTCCACGGAAGCAGGTCC |
| | | | TCACTTTAATGCTGTGGCCACTGAGAAGTATTAAAGTGAGGACCT |
| | | | GCTTCTGAGGAGCGCCTTGACAGCAGCCATGGGAGGGCCTCGAGG |
| | | | ACGGGGTGAACTACGCCTGAGGATCCGATCTTTTTCCCTCTGCCA |
| | | | AAAATTATGGGGACATCATGAAGCCCCTTGAGCATCTGACTTCTG |
| | | | GCTAATAAAGGAAATTTATTTTCATTGCAATAGTGTGTTGGAATT |
| | | | TTTTGTGTCTCTCACTCGGCCTAGGTAGATAAGTAGCATGGCGGG |
| | | | TTAATCATTAACTACAAGGAACCCCTAGTGATGGAGTTGGCCACT |
| | | | CCCTCTCTGCGCGCTCGCTCGCTCACTGAGGCCGGGCGACCAAAG |
| | | | GTCGCCCGACGCCCGGGCTTTGCCCGGGCGGCCTCAGTGAGCGAG |
| | | | CGAGCGCGCAG |
| | Modulatory | 2562 | CTCCCGCAGAACACCATGCGCTCCACGGAAGCAGGTCCTCACTTT |
| | Polynucleotide | | AATGCTGTGGCCACTGAGAAGTATTAAAGTGAGGACCTGCTTCTG |
| | sequence | | AGGAGCGCCTTGACAGCAGCCATGGGAGGGCC |

[1425] Table 16 provides ITR to ITR sequence of H1.mir104-788.2 with albumin derived filler. Also provided in Table 16 are the components that comprise the ITR to ITR sequence. In some embodiments, the components may be separated from each other by vector backbone sequence. In some embodiments, the AAV particle includes the nucleotide sequence of SEQ ID NO: 109, or a nucleotide sequence substantially identical (e.g., having at least 70%, 75%, 80%, 85%, 90%, 92%, 95%, 97%, 98%, or 99% sequence identity) thereto; or a nucleotide sequence having at least one, two, three, four, five, six, or seven modifications, but no more than ten modifications of SEQ ID NO: 109. In some embodiments, the AAV particle includes nucleotide sequence of SEQ ID NO: 2562, or a nucleotide sequence substantially identical (e.g., having at least 70%, 75%, 80%, 85%, 90%, 92%, 95%, 97%, 98%, or 99% sequence identity) thereto; or a nucleotide sequence having at least one, two, three, four, five, six, or seven modifications, but no more than ten modifications of SEQ ID NO: 2562.

TABLE 16
ITR to ITR of AAV Particles, H1.mir104-788.2 (with albumin derived filler)
comprising Modulatory Polynucleotides and its components

| | SEQ | |
|---|---|---|
| | ID | |
| Description | NO. | Sequence |
| ITR to ITR of | 125 | CTGCGCGCTCGCTCGCTCACTGAGGCCGCCCGGGCAAAGCCCGGGCGTCGGGCGACC |
| H1.mir104- | | TTTGGTCGCCCGGCCTCAGTGAGCGAGCGAGCGCGCAGAGAGGGAGTGTAGCCATGC |
| 788.2 with | | TCTAGGAAGATCAATTCAATTCACGCGTATAGTCTTCTGCACAGGGCATTCTTTTTG |
| albumin derived | | CTTCAGGATGTTTACAACATTTGCTGCCCACTTTTCCTAGGTTTCTTGAGACCTCTA |
| filler | | CAAGAGTTGGAGTTGACACTTGGGGTACTTTCTTGGTGTAACGAACTAATAGCCTGA |
| | | AAAAAAGAAGTCATGTGTTTTCAGCAAGGCAAGAAACTGTCTAACATAGTAGATAAA |
| | | ACAGAGAACACTTGGCCGGAATCAACTAAGATGTTGCTATGTTCCATTCATCATATT |
| | | ATCTCCATCTGCAGAGTAGTGGGTTAGTGGAGGGTAGAAAACATTCTCCTGAACAAC |
| | | TAGTTAAACTTGGCTTTGAGTTCCACCTGTACCACTTGCATAATCTTGGGAAAGTGA |
| | | GTTGCCTAATTCAGTGACATTAATAAATTTATTAATTTCTTCTTTCAATAAAACCTG |
| | | GAGAGAGCTTCATATGTATCAGCATATGCTAAACTTGAAAGATACAAGTAGAAAATG |
| | | GAAGGAAATATATCTGACTCAATAGGGATAGTTCAAGGGTTAAATTAAAAGTAGTAA |
| | | AGTATTATAATTAATCTGACATGGTACCCTCTAGCGGCCGCAATTCGAACGCTGACG |
| | | TCATCAACCCGCTCCAAGGAATCGCGGGCCCAGTGTCACTAGGCGGGAACACCCAGC |
| | | GCGCGTGCGCCCTGGCAGGAAGATGGCTGTGAGGGACAGGGAGTGGCGCCCTGCAAT |
| | | ATTTGCATGTCGCTATGTGTTCTGGGAAATCACCATAAACGTGAAATGTCTTTGGAT |
| | | TTGGGAATCTTATAAGTTCTGTATGAGACCACACCGGTACCGAGCTCTCCCGCAGAA |
| | | CACCATGCGCTCCACGGAAGCAGGTCCTCACTTTAATGCTGTGGCCACTGAGAAGTA |
| | | TTAAAGTGAGGACCTGCTTCTGAGGAGCGCCTTGACAGCAGCCATGGGAGGGCCTCG |
| | | AGGACGGGGTGAACTACGCCTGAGGATCCGATCTTTTTCCCTCTGCCAAAAATTATG |
| | | GGGACATCATGAAGCCCCTTGAGCATCTGACTTCTGGCTAATAAAGGAAATTTATTT |
| | | TCATTGCAATAGTGTGTTGGAATTTTTTGTGTCTCTCACTCGGCCTAGGTAGATAAG |
| | | TAGCATGGCGGGTTAATCATTAACTACAAGGAACCCCTAGTGATGGAGTTGGCCACT |
| | | CCCTCTCTGCGCGCTCGCTCGCTCACTGAGGCCGGGCGACCAAAGGTCGCCCGACGC |
| | | CCGGGCTTTGCCCGGGCGGCCTCAGTGAGCGAGCGAGCGCGCAG |

ITR-ITR Components of H1.mir104-788.2 (with albumin derived filler)

| | | |
|---|---|---|
| 5′ITR | 126 | CTGCGCGCTCGCTCGCTCACTGAGGCCGCCCGGGCAAAGCCCGGGCGTCGGGCGACC |
| | | TTTGGTCGCCCGGCCTCAGTGAGCGAGCGAGCGCGCAGAGAGGGAGTG |
| Albumin | 127 | ATAGTCTTCTGCACAGGGCATTCTTTTTGCTTCAGGATGTTTACAACATTTGCTGCC |
| derived filler | | CACTTTTCCTAGGTTTCTTGAGACCTCTACAAGAGTTGGAGTTGACACTTGGGGTAC |
| | | TTTCTTGGTGTAACGAACTAATAGCCTGAAAAAAAGAAGTCATGTGTTTTCAGCAAG |
| | | GCAAGAAACTGTCTAACATAGTAGATAAAACAGAGAACACTTGGCCGGAATCAACTA |
| | | AGATGTTGCTATGTTCCATTCATCATATTATCTCCATCTGCAGAGTAGTGGGTTAGT |
| | | GGAGGGTAGAAAACATTCTCCTGAACAACTAGTTAAACTTGGCTTTGAGTTCCACCT |
| | | GTACCACTTGCATAATCTTGGGAAAGTGAGTTGCCTAATTCAGTGACATTAATAAAT |
| | | TTATTAATTTCTTCTTTCAATAAAACCTGGAGAGAGCTTCATATGTATCAGCATATG |
| | | CTAAACTTGAAAGATACAAGTAGAAAATGGAAGGAAATATATCTGACTCAATAGGGA |
| | | TAGTTCAAGGGTTAAATTAAAAGTAGTAAAGTATTATAATTAATCTGACATGGTACC |
| H1 promoter | 128 | AATTCGAACGCTGACGTCATCAACCCGCTCCAAGGAATCGCGGGCCCAGTGTCACTA |
| | | GGCGGGAACACCCAGCGCGCGTGCGCCCTGGCAGGAAGATGGCTGTGAGGGACAGGG |
| | | AGTGGCGCCCTGCAATATTTGCATGTCGCTATGTGTTCTGGGAAATCACCATAAACG |
| | | TGAAATGTCTTTGGATTTGGGAATCTTATAAGTTCTGTATGAGACCAC |
| Modulatory | 2562 | CTCCCGCAGAACACCATGCGCTCCACGGAAGCAGGTCCTCACTTTAATGCTGTGGCC |
| Polynucleotide | | ACTGAGAAGTATTAAAGTGAGGACCTGCTTCTGAGGAGCGCCTTGACAGCAGCCATG |
| (SOD1- | | GGAGGGCC |
| miR104-788.2) | | |
| rBGpA | 129 | GATCTTTTTCCCTCTGCCAAAAATTATGGGGACATCATGAAGCCCCTTGAGCATCTG |
| | | ACTTCTGGCTAATAAAGGAAATTTATTTTCATTGCAATAGTGTGTTGGAATTTTTTG |
| | | TGTCTCTCACTCG |
| 3′ITR | 130 | AGGAACCCCTAGTGATGGAGTTGGCCACTCCCTCTCTGCGCGCTCGCTCGCTCACTG |
| | | AGGCCGGGCGACCAAAGGTCGCCCGACGCCCGGGCTTTGCCCGGGCGGCCTCAGTGA |
| | | GCGAGCGAGCGCGCAG |

[1426] Tables 17 and 18 provide further variant ITR to ITR sequences of mir104-788.2 with different promoters. In some embodiments, the components may be separated from each other by vector backbone sequence.

TABLE 17
Additional ITR to ITR sequences of AAV Particles of mir104-788.2 comprising
Modulatory Polynucleotides and their components

| | | SEQ |
|---|---|---|
| Description | Sequence | ID NO |
| ITR to ITR of | CTGCGCGCTCGCTCGCTCACTGAGGCCGCCCGGGCAAAGCCCGGGCGTCGGGCGA | 4028 |
| CBA.mir104-788.2 | CCTTTGGTCGCCCGGCCTCAGTGAGCGAGCGAGCGCGCAGAGAGGGAGTGTAGCC | |
| with hβG | ATGCTCTAGGAAGATCAATTCAATTCACGCGTCGACATTGATTATTGACTAGTTA | |
| exon/intron/exon | TTAATAGTAATCAATTACGGGGTCATTAGTTCATAGCCCATATATGGAGTTCCGC | |
| (construct 1) | GTTACATAACTTACGGTAAATGGCCCGCCTGGCTGACCGCCCAACGACCCCCGCC | |
| | CATTGACGTCAATAATGACGTATGTTCCCATAGTAACGCCAATAGGGACTTTCCA | |
| | TTGACGTCAATGGGTGGAGTATTTACGGTAAACTGCCCACTTGGCAGTACATCAA | |
| | GTGTATCATATGCCAAGTACGCCCCCTATTGACGTCAATGACGGTAAATGGCCCG | |
| | CCTGGCATTATGCCCAGTACATGACCTTATGGGACTTTCCTACTTGGCAGTACAT | |
| | CTACGTATTAGTCATCGCTATTACCATGTCGAGGCCACGTTCTGCTTCACTCTCC | |
| | CCATCTCCCCCCCCTCCCCACCCCCAATTTTGTATTTATTTATTTTTTAATTATT | |
| | TTGTGCAGCGATGGGGGCGGGGGGGGGGGGCGCGCGCCAGGCGGGGCGGGGGGGG | |
| | GCGAGGGGGGGGGCGGGGCGAGGCGGAGAGGTGCGGCGGCAGCCAATCAGAGCGG | |
| | CGCGCTCCGAAAGTTTCCTTTTATGGCGAGGCGGCGGCGGCGGCGGCCCTATAAA | |
| | AAGCGAAGCGCGCGGCGGGCGGGAGCAAGCTTCGTTTAGTGAACCGTCAGATCGC | |
| | CTGGAGACGCCATCCACGCTGTTTTGACCTCCATAGAAGACACCGGGACCGATCC | |
| | AGCCTCCGCGGATTCGAATCCCGGCCGGGAACGGTGCATTGGAACGCGGATTCCC | |
| | CGTGCCAAGAGTGACGTAAGTACCGCCTATAGAGTCTATAGGCCCACAAAAAATG | |
| | CTTTCTTCTTTTAATATACTTTTTTGTTTATCTTATTTCTAATACTTTCCCTAAT | |
| | CTCTTTCTTTCAGGGCAATAATGATACAATGTATCATGCCTCTTTGCACCATTCT | |
| | AAAGAATAACAGTGATAATTTCTGGGTTAAGGCAATAGCAATATTTCTGCATATA | |
| | AATATTTCTGCATATAAATTGTAACTGATGTAAGAGGTTTCATATTGCTAATAGC | |
| | AGCTACAATCCAGCTACCATTCTGCTTTTATTTTATGGTTGGGATAAGGCTGGAT | |
| | TATTCTGAGTCCAAGCTAGGCCCTTTTGCTAATCATGTTCATACCTCTTATCTTC | |
| | CTCCCACAGCTCCTGGGCAACGTGCTGGTCTGTGTGCTGGCCCATCACTTTGGCA | |
| | AAGAATTGGGATTCGAACCGGTACCGAGCTCTCCCGCAGAACACCATGCGCTCCA | |
| | CGGAAGCAGGTCCTCACTTTAATGCTGTGGCCACTGAGAAGTATTAAAGTGAGGA | |
| | CCTGCTTCTGAGGAGCGCCTTGACAGCAGCCATGGGAGGGCCTCGAGGGGTGGCA | |
| | TCCCTGTGACCCCTCCCCAGTGCCTCTCCTGGCCCTGGAAGTTGCCACTCCAGTG | |
| | CCCACCAGCCTTGTCCTAATAAAATTAAGTTGCATCATTTTGTCTGACTAGGTGT | |
| | CCTTCTATAATATTATGGGGTGGAGGGGGGTGGTATGGAGCAAGGGGCAAGTTGG | |
| | GAAGACAACCTGTAGGGCCTGCGGGGTCTATTGGGAACCAAGCTGGAGTGCAGTG | |
| | GCACAATCTTGGCTCACTGCAATCTCCGCCTCCTGGGTTCAAGCGATTCTCCTGC | |
| | CTCAGCCTCCCGAGTTGTTGGGATTCCAGGCATGCATGACCAGGCTCAGCTAATT | |
| | TTTGTTTTTTTGGTAGAGACGGGGTTTCACCATATTGGCCAGGCTGGTCTCCAAC | |
| | TCCTAATCTCAGGTGATCTACCCACCTTGGCCTCCCAAATTGCTGGGATTACAGG | |
| | CGTGAACCACTGCTCCCTTCCCTGTCCTTATCGATGCCTAGGGTTAATCATTAAC | |
| | TACAAGGAACCCCTAGTGATGGAGTTGGCCACTCCCTCTCTGCGCGCTCGCTCGC | |
| | TCACTGAGGCCGGGCGACCAAAGGTCGCCCGACGCCCGGGCTTTGCCCGGGCGGC | |
| | CTCAGTGAGCGAGCGAGCGCGCAG | |
| ITR to ITR of | CTGCGCGCTCGCTCGCTCACTGAGGCCGCCCGGGCAAAGCCCGGGCGTCGGGCGA | 4029 |
| miniCBA.mir104- | CCTTTGGTCGCCCGGCCTCAGTGAGCGAGCGAGCGCGCAGAGAGGGAGTGTAGCC | |
| 788.2 with hBG | ATGCTCTAGGAAGATCAATTCAATTCACGCGTCCACGTTCTGCTTCACTCTCCCC | |
| exon/intron/exon | ATCTCCCCCCCCTCCCCACCCCCAATTTTGTATTTATTTATTTTTTAATTATTTT | |
| (construct 2) | GTGCAGCGATGGGGGCGGGGGGGGGGGGCGCGCGCCAGGCGGGGCGGGGCGGGGC | |
| | GAGGGGCGGGGCGGGGCGAGGCGGAGAGGTGCGGCGGCAGCCAATCAGAGCGGCG | |
| | CGCTCCGAAAGTTTCCTTTTATGGCGAGGCGGCGGCGGCGGCGGCCCTATAAAAA | |
| | GCGAAGCGCGCGGCGGGAAGCTTCGTTTAGTGAACCGTCAGATCGCCTGGAGACG | |
| | CCATCCACGCTGTTTTGACCTCCATAGAAGACACCGGGACCGATCCAGCCTCCGC | |
| | GGATTCGAATCCCGGCCGGGAACGGTGCATTGGAACGCGGATTCCCCGTGCCAAG | |
| | AGTGACGTAAGTACCGCCTATAGAGTCTATAGGCCCACAAAAAATGCTTTCTTCT | |
| | TTTAATATACTTTTTTGTTTATCTTATTTCTAATACTTTCCCTAATCTCTTTCTT | |
| | TCAGGGCAATAATGATACAATGTATCATGCCTCTTTGCACCATTCTAAAGAATAA | |
| | CAGTGATAATTTCTGGGTTAAGGCAATAGCAATATTTCTGCATATAAATATTTCT | |
| | GCATATAAATTGTAACTGATGTAAGAGGTTTCATATTGCTAATAGCAGCTACAAT | |
| | CCAGCTACCATTCTGCTTTTATTTTATGGTTGGGATAAGGCTGGATTATTCTGAG | |
| | TCCAAGCTAGGCCCTTTTGCTAATCATGTTCATACCTCTTATCTTCCTCCCACAG | |
| | CTCCTGGGCAACGTGCTGGTCTGTGTGCTGGCCCATCACTTTGGCAAAGAATTGG | |
| | GATTCGAACCGGTACCGAGCTCTCCCGCAGAACACCATGCGCTCCACGGAAGCAG | |
| | GTCCTCACTTTAATGCTGTGGCCACTGAGAAGTATTAAAGTGAGGACCTGCTTCT | |
| | GAGGAGCGCCTTGACAGCAGCCATGGGAGGGCCTCGAGGGGTGGCATCCCTGTGA | |
| | CCCCTCCCCAGTGCCTCTCCTGGCCCTGGAAGTTGCCACTCCAGTGCCCACCAGC | |
| | CTTGTCCTAATAAAATTAAGTTGCATCATTTTGTCTGACTAGGTGTCCTTCTATA | |
| | ATATTATGGGGTGGAGGGGGGTGGTATGGAGCAAGGGGCAAGTTGGGAAGACAAC | |
| | CTGTAGGGCCTGCGGGGTCTATTGGGAACCAAGCTGGAGTGCAGTGGCACAATCT | |
| | TGGCTCACTGCAATCTCCGCCTCCTGGGTTCAAGCGATTCTCCTGCCTCAGCCTC | |
| | CCGAGTTGTTGGGATTCCAGGCATGCATGACCAGGCTCAGCTAATTTTTGTTTTT | |
| | TTGGTAGAGACGGGGTTTCACCATATTGGCCAGGCTGGTCTCCAACTCCTAATCT | |
| | CAGGTGATCTACCCACCTTGGCCTCCCAAATTGCTGGGATTACAGGCGTGAACCA | |
| | CTGCTCCCTTCCCTGTCCTTATCGATGCCTAGGGTTAATCATTAACTACAAGGAA | |
| | CCCCTAGTGATGGAGTTGGCCACTCCCTCTCTGCGCGCTCGCTCGCTCACTGAGG | |
| | CCGGGCGACCAAAGGTCGCCCGACGCCCGGGCTTTGCCCGGGCGGCCTCAGTGAG | |
| | CGAGCGAGCGCGCAG | |
| ITR to ITR of | CTGCGCGCTCGCTCGCTCACTGAGGCCGCCCGGGCAAAGCCCGGGCGTCGGGCGA | 4030 |
| miniEF1aV2.mir10 | CCTTTGGTCGCCCGGCCTCAGTGAGCGAGCGAGCGCGCAGAGAGGGAGTGTAGCC | |
| 4-788.2 with hBG | ATGCTCTAGGAAGATCAATTCAATTCACGCGTCGTGAGGCTCCGGTGCCCGTCAG | |
| exon/intron/exon | TGGGCAGAGCGCACATCGCCCACAGTCCCCGAGAAGTTGGGGGGAGGGGTCGGCA | |
| (construct 3) | ATTGAACCGGTGCCTAGAGAAGGTGGCGCGGGGTAAACTGGGAAAGTGATGTCGT | |
| | GTACTGGCTCCGCCTTTTTCCCGAGGGTGGGGGAGAACCGTATATAAGTGCAGTA | |
| | GTCGCCGTGAACGTTCTTTTTCGCAACGGGTTTGCCGCCAGAACACAGAAGCTTC | |
| | GTTTAGTGAACCGTCAGATCGCCTGGAGACGCCATCCACGCTGTTTTGACCTCCA | |
| | TAGAAGACACCGGGACCGATCCAGCCTCCGCGGATTCGAATCCCGGCCGGGAACG | |
| | GTGCATTGGAACGCGGATTCCCCGTGCCAAGAGTGACGTAAGTACCGCCTATAGA | |
| | GTCTATAGGCCCACAAAAAATGCTTTCTTCTTTTAATATACTTTTTTGTTTATCT | |
| | TATTTCTAATACTTTCCCTAATCTCTTTCTTTCAGGGCAATAATGATACAATGTA | |
| | TCATGCCTCTTTGCACCATTCTAAAGAATAACAGTGATAATTTCTGGGTTAAGGC | |
| | AATAGCAATATTTCTGCATATAAATATTTCTGCATATAAATTGTAACTGATGTAA | |
| | GAGGTTTCATATTGCTAATAGCAGCTACAATCCAGCTACCATTCTGCTTTTATTT | |
| | TATGGTTGGGATAAGGCTGGATTATTCTGAGTCCAAGCTAGGCCCTTTTGCTAAT | |
| | CATGTTCATACCTCTTATCTTCCTCCCACAGCTCCTGGGCAACGTGCTGGTCTGT | |
| | GTGCTGGCCCATCACTTTGGCAAAGAATTGGGATTCGAACCGGTACCGAGCTCTC | |
| | CCGCAGAACACCATGCGCTCCACGGAAGCAGGTCCTCACTTTAATGCTGTGGCCA | |
| | CTGAGAAGTATTAAAGTGAGGACCTGCTTCTGAGGAGCGCCTTGACAGCAGCCAT | |
| | GGGAGGGCCTCGAGGGGTGGCATCCCTGTGACCCCTCCCCAGTGCCTCTCCTGGC | |
| | CCTGGAAGTTGCCACTCCAGTGCCCACCAGCCTTGTCCTAATAAAATTAAGTTGC | |
| | ATCATTTTGTCTGACTAGGTGTCCTTCTATAATATTATGGGGTGGAGGGGGGTGG | |
| | TATGGAGCAAGGGGCAAGTTGGGAAGACAACCTGTAGGGCCTGCGGGGTCTATTG | |
| | GGAACCAAGCTGGAGTGCAGTGGCACAATCTTGGCTCACTGCAATCTCCGCCTCC | |
| | TGGGTTCAAGCGATTCTCCTGCCTCAGCCTCCCGAGTTGTTGGGATTCCAGGCAT | |
| | GCATGACCAGGCTCAGCTAATTTTTGTTTTTTTGGTAGAGACGGGGTTTCACCAT | |
| | ATTGGCCAGGCTGGTCTCCAACTCCTAATCTCAGGTGATCTACCCACCTTGGCCT | |
| | CCCAAATTGCTGGGATTACAGGCGTGAACCACTGCTCCCTTCCCTGTCCTTATCG | |
| | ATGCCTAGGGTTAATCATTAACTACAAGGAACCCCTAGTGATGGAGTTGGCCACT | |
| | CCCTCTCTGCGCGCTCGCTCGCTCACTGAGGCCGGGCGACCAAAGGTCGCCCGAC | |
| | GCCCGGGCTTTGCCCGGGCGGCCTCAGTGAGCGAGCGAGCGCGCAG | |
| ITR to ITR of | CTGCGCGCTCGCTCGCTCACTGAGGCCGCCCGGGCAAAGCCCGGGCGTCGGGCGA | 4031 |
| PGK.mir104-788.2 | CCTTTGGTCGCCCGGCCTCAGTGAGCGAGCGAGCGCGCAGAGAGGGAGTGTAGCC | |
| with hBG | ATGCTCTAGGAAGATCAATTCAATTCACGCGTGGGTAGGGGAGGCGCTTTTCCCA | |
| exon/intron/exon | AGGCAGTCTGGAGCATGCGCTTTAGCAGCCCCGCTGGGCACTTGGCGCTACACAA | |
| (construct 4) | GTGGCCTCTGGCCTCGCACACATTCCACATCCACCGGTAGGCGCCAACCGGCTCC | |
| | GTTCTTTGGTGGCCCCTTCGCGCCACCTTCTACTCCTCCCCTAGTCAGGAAGTTC | |
| | CCCCCCGCCCCGCAGCTCGCGTCGTGCAGGACGTGACAAATGGAAGTAGCACGTC | |
| | TCACTAGTCTCGTGCAGATGGACAGCACCGCTGAGCAATGGAAGCGGGTAGGCCT | |
| | TTGGGGCAGCGGCCAATAGCAGCTTTGCTCCTTCGCTTTCTGGGCTCAGAGGCTG | |
| | GGAAGGGGTGGGTCCGGGGGCGGGCTCAGGGGGGGGCTCAGGGGCGGGGCGGGCG | |
| | CCCGAAGGTCCTCCGGAGGCCCGGCATTCTGCACGCTTCAAAAGCGCACGTCTGC | |
| | CGCGCTGTTCTCCTCTTCCTCATCTCCGGGCCTTTCGAAGCTTCGTTTAGTGAAC | |
| | CGTCAGATCGCCTGGAGACGCCATCCACGCTGTTTTGACCTCCATAGAAGACACC | |
| | GGGACCGATCCAGCCTCCGCGGATTCGAATCCCGGCCGGGAACGGTGCATTGGAA | |
| | CGCGGATTCCCCGTGCCAAGAGTGACGTAAGTACCGCCTATAGAGTCTATAGGCC | |
| | CACAAAAAATGCTTTCTTCTTTTAATATACTTTTTTGTTTATCTTATTTCTAATA | |
| | CTTTCCCTAATCTCTTTCTTTCAGGGCAATAATGATACAATGTATCATGCCTCTT | |
| | TGCACCATTCTAAAGAATAACAGTGATAATTTCTGGGTTAAGGCAATAGCAATAT | |
| | TTCTGCATATAAATATTTCTGCATATAAATTGTAACTGATGTAAGAGGTTTCATA | |
| | TTGCTAATAGCAGCTACAATCCAGCTACCATTCTGCTTTTATTTTATGGTTGGGA | |
| | TAAGGCTGGATTATTCTGAGTCCAAGCTAGGCCCTTTTGCTAATCATGTTCATAC | |
| | CTCTTATCTTCCTCCCACAGCTCCTGGGCAACGTGCTGGTCTGTGTGCTGGCCCA | |
| | TCACTTTGGCAAAGAATTGGGATTCGAACCGGTACCGAGCTCTCCCGCAGAACAC | |
| | CATGCGCTCCACGGAAGCAGGTCCTCACTTTAATGCTGTGGCCACTGAGAAGTAT | |
| | TAAAGTGAGGACCTGCTTCTGAGGAGCGCCTTGACAGCAGCCATGGGAGGGCCTC | |
| | GAGGGGTGGCATCCCTGTGACCCCTCCCCAGTGCCTCTCCTGGCCCTGGAAGTTG | |
| | CCACTCCAGTGCCCACCAGCCTTGTCCTAATAAAATTAAGTTGCATCATTTTGTC | |
| | TGACTAGGTGTCCTTCTATAATATTATGGGGTGGAGGGGGGTGGTATGGAGCAAG | |
| | GGGCAAGTTGGGAAGACAACCTGTAGGGCCTGCGGGGTCTATTGGGAACCAAGCT | |
| | GGAGTGCAGTGGCACAATCTTGGCTCACTGCAATCTCCGCCTCCTGGGTTCAAGC | |
| | GATTCTCCTGCCTCAGCCTCCCGAGTTGTTGGGATTCCAGGCATGCATGACCAGG | |
| | CTCAGCTAATTTTTGTTTTTTTGGTAGAGACGGGGTTTCACCATATTGGCCAGGC | |
| | TGGTCTCCAACTCCTAATCTCAGGTGATCTACCCACCTTGGCCTCCCAAATTGCT | |
| | GGGATTACAGGCGTGAACCACTGCTCCCTTCCCTGTCCTTATCGATGCCTAGGGT | |
| | TAATCATTAACTACAAGGAACCCCTAGTGATGGAGTTGGCCACTCCCTCTCTGCG | |
| | CGCTCGCTCGCTCACTGAGGCCGGGCGACCAAAGGTCGCCCGACGCCCGGGCTTT | |
| | GCCCGGGCGGCCTCAGTGAGCGAGCGAGCGCGCAG | |
| ITR to ITR of | CTGCGCGCTCGCTCGCTCACTGAGGCCGCCCGGGCAAAGCCCGGGCGTCGGGCGA | 4032 |
| MP84.mir104- | CCTTTGGTCGCCCGGCCTCAGTGAGCGAGCGAGCGCGCAGAGAGGGAGTGTAGCC | |
| 788.2 with hBG | ATGCTCTAGGAAGATCAATTCAATTCACGCGTCCCTAATGGGCCAGGCGGCAGGG | |
| exon/intron/exon | GTTGAGAGGTAGGGGAGATGGGCTCTGAGACTATAAAGCCAGCGGGGGCCCAGCA | |
| (construct 5) | GCCCTCAAGCTTCGTTTAGTGAACCGTCAGATCGCCTGGAGACGCCATCCACGCT | |
| | GTTTTGACCTCCATAGAAGACACCGGGACCGATCCAGCCTCCGCGGATTCGAATC | |
| | CCGGCCGGGAACGGTGCATTGGAACGCGGATTCCCCGTGCCAAGAGTGACGTAAG | |
| | TACCGCCTATAGAGTCTATAGGCCCACAAAAAATGCTTTCTTCTTTTAATATACT | |
| | TTTTTGTTTATCTTATTTCTAATACTTTCCCTAATCTCTTTCTTTCAGGGCAATA | |
| | ATGATACAATGTATCATGCCTCTTTGCACCATTCTAAAGAATAACAGTGATAATT | |
| | TCTGGGTTAAGGCAATAGCAATATTTCTGCATATAAATATTTCTGCATATAAATT | |
| | GTAACTGATGTAAGAGGTTTCATATTGCTAATAGCAGCTACAATCCAGCTACCAT | |
| | TCTGCTTTTATTTTATGGTTGGGATAAGGCTGGATTATTCTGAGTCCAAGCTAGG | |
| | CCCTTTTGCTAATCATGTTCATACCTCTTATCTTCCTCCCACAGCTCCTGGGCAA | |
| | CGTGCTGGTCTGTGTGCTGGCCCATCACTTTGGCAAAGAATTGGGATTCGAACCG | |
| | GTACCGAGCTCTCCCGCAGAACACCATGCGCTCCACGGAAGCAGGTCCTCACTTT | |
| | AATGCTGTGGCCACTGAGAAGTATTAAAGTGAGGACCTGCTTCTGAGGAGCGCCT | |
| | TGACAGCAGCCATGGGAGGGCCTCGAGGGGTGGCATCCCTGTGACCCCTCCCCAG | |
| | TGCCTCTCCTGGCCCTGGAAGTTGCCACTCCAGTGCCCACCAGCCTTGTCCTAAT | |
| | AAAATTAAGTTGCATCATTTTGTCTGACTAGGTGTCCTTCTATAATATTATGGGG | |
| | TGGAGGGGGGTGGTATGGAGCAAGGGGCAAGTTGGGAAGACAACCTGTAGGGCCT | |
| | GCGGGGTCTATTGGGAACCAAGCTGGAGTGCAGTGGCACAATCTTGGCTCACTGC | |
| | AATCTCCGCCTCCTGGGTTCAAGCGATTCTCCTGCCTCAGCCTCCCGAGTTGTTG | |
| | GGATTCCAGGCATGCATGACCAGGCTCAGCTAATTTTTGTTTTTTTGGTAGAGAC | |
| | GGGGTTTCACCATATTGGCCAGGCTGGTCTCCAACTCCTAATCTCAGGTGATCTA | |
| | CCCACCTTGGCCTCCCAAATTGCTGGGATTACAGGCGTGAACCACTGCTCCCTTC | |
| | CCTGTCCTTATCGATGCCTAGGGTTAATCATTAACTACAAGGAACCCCTAGTGAT | |
| | GGAGTTGGCCACTCCCTCTCTGCGCGCTCGCTCGCTCACTGAGGCCGGGCGACCA | |
| | AAGGTCGCCCGACGCCCGGGCTTTGCCCGGGCGGCCTCAGTGAGCGAGCGAGCGC | |
| | GCAG | |
| ITR to ITR of | CTGCGCGCTCGCTCGCTCACTGAGGCCGCCCGGGCAAAGCCCGGGCGTCGGGCGA | 4033 |
| hSYN(long).mir10 | CCTTTGGTCGCCCGGCCTCAGTGAGCGAGCGAGCGCGCAGAGAGGGAGTGTAGCC | |
| 4-788.2 with hBG | ATGCTCTAGGAAGATCAATTCAATTCACGCGTCGCGTGGGGTTATTTCTCTACTT | |
| exon/intron/exon | TCGTGTCTCTGAGTGTGCTTCCAGTGCCCCCCTCCCCCCAAAAAATGCCTTCTGA | |
| (construct 6) | GTTGAATATCAACACTACAAACCTAGTATCTGCAGAGGGCCCTGCGTATGAGTGC | |
| | AAGTGGGTTTTAGGACCAGGATGAGGCGGGGTGGGGGTGCCTACCTGACGACCGA | |
| | CCCCGACCCACTGGACAAGCACCCAACCCCCATTCCCCAAATTGCGCATCCCCTA | |
| | TCAGAGAGGGGGAGGGGAAACAGGATGCGGCGAGGCGCGTGCGCACTGCCAGCTT | |
| | CAGCACCGCGGACAGTGCCTTCGCCCCCGCCTGGCGGCGCGCGCCACCGCCGCCT | |
| | CAGCACTGAAGGCGCGCTGACGTCACTCGCCGGTCCCCCGCAAACTCCCCTTCCC | |
| | GGCCACCTTGGTCGCGTCCGCGCCGCCGCCGGCCCAGCCGGACCGCACCACGCGA | |
| | GGCGCGAGATAGGGGGGCACGGGCGCGACCATCTGCGCTGCGGCGCCGGCGACTC | |
| | AGCGCTGCCTCAGTCTGCGGTGGGCAGCGGAGGAGTCGTGTCGTGCCTGAGAGCG | |
| | CAGCTGTGCTCCTGGGCACCGCGCAGTCCGCCCCCGCGGCTCCTGGCCAGACCAC | |
| | CCCTAGGACCCCCTGCCCCAAGTCGCAGCCAAGCTTCGTTTAGTGAACCGTCAGA | |
| | TCGCCTGGAGACGCCATCCACGCTGTTTTGACCTCCATAGAAGACACCGGGACCG | |
| | ATCCAGCCTCCGCGGATTCGAATCCCGGCCGGGAACGGTGCATTGGAACGCGGAT | |
| | TCCCCGTGCCAAGAGTGACGTAAGTACCGCCTATAGAGTCTATAGGCCCACAAAA | |
| | AATGCTTTCTTCTTTTAATATACTTTTTTGTTTATCTTATTTCTAATACTTTCCC | |
| | TAATCTCTTTCTTTCAGGGCAATAATGATACAATGTATCATGCCTCTTTGCACCA | |
| | TTCTAAAGAATAACAGTGATAATTTCTGGGTTAAGGCAATAGCAATATTTCTGCA | |
| | TATAAATATTTCTGCATATAAATTGTAACTGATGTAAGAGGTTTCATATTGCTAA | |
| | TAGCAGCTACAATCCAGCTACCATTCTGCTTTTATTTTATGGTTGGGATAAGGCT | |
| | GGATTATTCTGAGTCCAAGCTAGGCCCTTTTGCTAATCATGTTCATACCTCTTAT | |
| | CTTCCTCCCACAGCTCCTGGGCAACGTGCTGGTCTGTGTGCTGGCCCATCACTTT | |
| | GGCAAAGAATTGGGATTCGAACCGGTACCGAGCTCTCCCGCAGAACACCATGCGC | |
| | TCCACGGAAGCAGGTCCTCACTTTAATGCTGTGGCCACTGAGAAGTATTAAAGTG | |
| | AGGACCTGCTTCTGAGGAGCGCCTTGACAGCAGCCATGGGAGGGCCTCGAGGGGT | |
| | GGCATCCCTGTGACCCCTCCCCAGTGCCTCTCCTGGCCCTGGAAGTTGCCACTCC | |
| | AGTGCCCACCAGCCTTGTCCTAATAAAATTAAGTTGCATCATTTTGTCTGACTAG | |
| | GTGTCCTTCTATAATATTATGGGGTGGAGGGGGGTGGTATGGAGCAAGGGGCAAG | |
| | TTGGGAAGACAACCTGTAGGGCCTGCGGGGTCTATTGGGAACCAAGCTGGAGTGC | |
| | AGTGGCACAATCTTGGCTCACTGCAATCTCCGCCTCCTGGGTTCAAGCGATTCTC | |
| | CTGCCTCAGCCTCCCGAGTTGTTGGGATTCCAGGCATGCATGACCAGGCTCAGCT | |
| | AATTTTTGTTTTTTTGGTAGAGACGGGGTTTCACCATATTGGCCAGGCTGGTCTC | |
| | CAACTCCTAATCTCAGGTGATCTACCCACCTTGGCCTCCCAAATTGCTGGGATTA | |
| | CAGGCGTGAACCACTGCTCCCTTCCCTGTCCTTATCGATGCCTAGGGTTAATCAT | |
| | TAACTACAAGGAACCCCTAGTGATGGAGTTGGCCACTCCCTCTCTGCGCGCTCGC | |
| | TCGCTCACTGAGGCCGGGCGACCAAAGGTCGCCCGACGCCCGGGCTTTGCCCGGG | |
| | CGGCCTCAGTGAGCGAGCGAGCGCGCAG | |
| ITR to ITR of | CTGCGCGCTCGCTCGCTCACTGAGGCCGCCCGGGCAAAGCCCGGGCGTCGGGCGA | 4034 |
| hSYN(short).mir10 | CCTTTGGTCGCCCGGCCTCAGTGAGCGAGCGAGCGCGCAGAGAGGGAGTGTAGCC | |
| 4-788.2 with hBG | ATGCTCTAGGAAGATCAATTCAATTCACGCGTTAGTATCTGCAGAGGGCCCTGCG | |
| exon/intron/exon | TATGAGTGCAAGTGGGTTTTAGGACCAGGATGAGGCGGGGTGGGGGTGCCTACCT | |
| (construct 7) | GACGACCGACCCCGACCCACTGGACAAGCACCCAACCCCCATTCCCCAAATTGCG | |
| | CATCCCCTATCAGAGAGGGGGAGGGGAAACAGGATGCGGCGAGGCGCGTGCGCAC | |
| | TGCCAGCTTCAGCACCGCGGACAGTGCCTTCGCCCCCGCCTGGCGGCGCGCGCCA | |
| | CCGCCGCCTCAGCACTGAAGGCGCGCTGACGTCACTCGCCGGTCCCCCGCAAACT | |
| | CCCCTTCCCGGCCACCTTGGTCGCGTCCGCGCCGCCGCCGGCCCAGCCGGACCGC | |
| | ACCACGCGAGGCGCGAGATAGGGGGGCACGGGCGCGACCATCTGCGCTGCGGCGC | |
| | CGGCGACTCAGCGCTGCCTCAGTCTGCGGTGGGCAGCGGAGGAGTCGTGTCGTGC | |
| | CTGAGAGCGCAGCTGTGCTCCTGGGCACCGCGCAGTCCGCCCCCGCGGCTCCTGG | |
| | CCAGACCACCCCTAGGACCCCCTGCCCCAAGTCGCAGCCAAGCTTCGTTTAGTGA | |
| | ACCGTCAGATCGCCTGGAGACGCCATCCACGCTGTTTTGACCTCCATAGAAGACA | |
| | CCGGGACCGATCCAGCCTCCGCGGATTCGAATCCCGGCCGGGAACGGTGCATTGG | |
| | AACGCGGATTCCCCGTGCCAAGAGTGACGTAAGTACCGCCTATAGAGTCTATAGG | |
| | CCCACAAAAAATGCTTTCTTCTTTTAATATACTTTTTTGTTTATCTTATTTCTAA | |
| | TACTTTCCCTAATCTCTTTCTTTCAGGGCAATAATGATACAATGTATCATGCCTC | |
| | TTTGCACCATTCTAAAGAATAACAGTGATAATTTCTGGGTTAAGGCAATAGCAAT | |
| | ATTTCTGCATATAAATATTTCTGCATATAAATTGTAACTGATGTAAGAGGTTTCA | |
| | TATTGCTAATAGCAGCTACAATCCAGCTACCATTCTGCTTTTATTTTATGGTTGG | |
| | GATAAGGCTGGATTATTCTGAGTCCAAGCTAGGCCCTTTTGCTAATCATGTTCAT | |
| | ACCTCTTATCTTCCTCCCACAGCTCCTGGGCAACGTGCTGGTCTGTGTGCTGGCC | |
| | CATCACTTTGGCAAAGAATTGGGATTCGAACCGGTACCGAGCTCTCCCGCAGAAC | |
| | ACCATGCGCTCCACGGAAGCAGGTCCTCACTTTAATGCTGTGGCCACTGAGAAGT | |
| | ATTAAAGTGAGGACCTGCTTCTGAGGAGCGCCTTGACAGCAGCCATGGGAGGGCC | |
| | TCGAGGGGTGGCATCCCTGTGACCCCTCCCCAGTGCCTCTCCTGGCCCTGGAAGT | |
| | TGCCACTCCAGTGCCCACCAGCCTTGTCCTAATAAAATTAAGTTGCATCATTTTG | |
| | TCTGACTAGGTGTCCTTCTATAATATTATGGGGTGGAGGGGGGTGGTATGGAGCA | |
| | AGGGGCAAGTTGGGAAGACAACCTGTAGGGCCTGCGGGGTCTATTGGGAACCAAG | |
| | CTGGAGTGCAGTGGCACAATCTTGGCTCACTGCAATCTCCGCCTCCTGGGTTCAA | |
| | GCGATTCTCCTGCCTCAGCCTCCCGAGTTGTTGGGATTCCAGGCATGCATGACCA | |
| | GGCTCAGCTAATTTTTGTTTTTTTGGTAGAGACGGGGTTTCACCATATTGGCCAG | |
| | GCTGGTCTCCAACTCCTAATCTCAGGTGATCTACCCACCTTGGCCTCCCAAATTG | |
| | CTGGGATTACAGGCGTGAACCACTGCTCCCTTCCCTGTCCTTATCGATGCCTAGG | |
| | GTTAATCATTAACTACAAGGAACCCCTAGTGATGGAGTTGGCCACTCCCTCTCTG | |
| | CGCGCTCGCTCGCTCACTGAGGCCGGGCGACCAAAGGTCGCCCGACGCCCGGGCT | |
| | TTGCCCGGGCGGCCTCAGTGAGCGAGCGAGCGCGCAG | |
| ITR to ITR of | CTGCGCGCTCGCTCGCTCACTGAGGCCGCCCGGGCAAAGCCCGGGCGTCGGGCGA | 4035 |
| CBA.mir104-788.2 | CCTTTGGTCGCCCGGCCTCAGTGAGCGAGCGAGCGCGCAGAGAGGGAGTGTAGCC | |
| with CpG deleted | ATGCTCTAGGAAGATCAATTCAATTCACGCGTCGACATTGATTATTGACTAGTTA | |
| hBG | TTAATAGTAATCAATTACGGGGTCATTAGTTCATAGCCCATATATGGAGTTCCGC | |
| exon/intron/exon | GTTACATAACTTACGGTAAATGGCCCGCCTGGCTGACCGCCCAACGACCCCCGCC | |
| (construct 8) | CATTGACGTCAATAATGACGTATGTTCCCATAGTAACGCCAATAGGGACTTTCCA | |
| | TTGACGTCAATGGGTGGAGTATTTACGGTAAACTGCCCACTTGGCAGTACATCAA | |
| | GTGTATCATATGCCAAGTACGCCCCCTATTGACGTCAATGACGGTAAATGGCCCG | |
| | CCTGGCATTATGCCCAGTACATGACCTTATGGGACTTTCCTACTTGGCAGTACAT | |
| | CTACGTATTAGTCATCGCTATTACCATGTCGAGGCCACGTTCTGCTTCACTCTCC | |
| | CCATCTCCCCCCCCTCCCCACCCCCAATTTTGTATTTATTTATTTTTTAATTATT | |
| | TTGTGCAGCGATGGGGGCGGGGGGGGGGGGCGCGCGCCAGGCGGGGCGGGGCGGG | |
| | GCGAGGGGGGGGGCGGGGCGAGGCGGAGAGGTGCGGCGGCAGCCAATCAGAGCGG | |
| | CGCGCTCCGAAAGTTTCCTTTTATGGCGAGGCGGCGGCGGCGGCGGCCCTATAAA | |
| | AAGCGAAGCGCGCGGCGGGCGGGAGCAAGCTTCGTTTAGTGAACCGTCAGATCAC | |
| | CTGGAGACACCATCCACACTGTTTTGACCTCCATAGAAGACACCAGGACCAATCC | |
| | AGCCTCCACAGATTCCAATCCCAGCCAGGAACAGTGCATTGGAACACAGATTCCC | |
| | CTTGCCAAGAGTGACGTAAGTACCGCCTATAGAGTCTATAGGCCCACAAAAAATG | |
| | CTTTCTTCTTTTAATATACTTTTTTGTTTATCTTATTTCTAATACTTTCCCTAAT | |
| | CTCTTTCTTTCAGGGCAATAATGATACAATGTATCATGCCTCTTTGCACCATTCT | |
| | AAAGAATAACAGTGATAATTTCTGGGTTAAGGCAATAGCAATATTTCTGCATATA | |
| | AATATTTCTGCATATAAATTGTAACTGATGTAAGAGGTTTCATATTGCTAATAGC | |
| | AGCTACAATCCAGCTACCATTCTGCTTTTATTTTATGGTTGGGATAAGGCTGGAT | |
| | TATTCTGAGTCCAAGCTAGGCCCTTTTGCTAATCATGTTCATACCTCTTATCTTC | |
| | CTCCCACAGCTCCTGGGCAACCTGCTGGTCTGTGTGCTGGCCCATCACTTTGGCA | |
| | AAGAATTGGGATTCGAACCGGTACCGAGCTCTCCCGCAGAACACCATGCGCTCCA | |
| | CGGAAGCAGGTCCTCACTTTAATGCTGTGGCCACTGAGAAGTATTAAAGTGAGGA | |
| | CCTGCTTCTGAGGAGCGCCTTGACAGCAGCCATGGGAGGGCCTCGAGGGGTGGCA | |
| | TCCCTGTGACCCCTCCCCAGTGCCTCTCCTGGCCCTGGAAGTTGCCACTCCAGTG | |
| | CCCACCAGCCTTGTCCTAATAAAATTAAGTTGCATCATTTTGTCTGACTAGGTGT | |
| | CCTTCTATAATATTATGGGGTGGAGGGGGGTGGTATGGAGCAAGGGGCAAGTTGG | |
| | GAAGACAACCTGTAGGGCCTGCGGGGTCTATTGGGAACCAAGCTGGAGTGCAGTG | |
| | GCACAATCTTGGCTCACTGCAATCTCCGCCTCCTGGGTTCAAGCGATTCTCCTGC | |
| | CTCAGCCTCCCGAGTTGTTGGGATTCCAGGCATGCATGACCAGGCTCAGCTAATT | |
| | TTTGTTTTTTTGGTAGAGACGGGGTTTCACCATATTGGCCAGGCTGGTCTCCAAC | |
| | TCCTAATCTCAGGTGATCTACCCACCTTGGCCTCCCAAATTGCTGGGATTACAGG | |
| | CGTGAACCACTGCTCCCTTCCCTGTCCTTATCGATGCCTAGGGTTAATCATTAAC | |
| | TACAAGGAACCCCTAGTGATGGAGTTGGCCACTCCCTCTCTGCGCGCTCGCTCGC | |
| | TCACTGAGGCCGGGCGACCAAAGGTCGCCCGACGCCCGGGCTTTGCCCGGGCGGC | |
| | CTCAGTGAGCGAGCGAGCGCGCAG | |
| ITR to ITR of | CTGCGCGCTCGCTCGCTCACTGAGGCCGCCCGGGCAAAGCCCGGGCGTCGGGCGA | 4036 |
| miniCBA.mir104- | CCTTTGGTCGCCCGGCCTCAGTGAGCGAGCGAGCGCGCAGAGAGGGAGTGTAGCC | |
| 788.2 with CpG | ATGCTCTAGGAAGATCAATTCAATTCACGCGTCCACGTTCTGCTTCACTCTCCCC | |
| deleted hBG | ATCTCCCCCCCCTCCCCACCCCCAATTTTGTATTTATTTATTTTTTAATTATTTT | |
| exon/intron/exon | GTGCAGCGATGGGGGCGGGGGGGGGGGGCGCGCGCCAGGCGGGGCGGGGCGGGGC | |
| (construct 9) | GAGGGGCGGGGCGGGGCGAGGCGGAGAGGTGCGGCGGCAGCCAATCAGAGCGGCG | |
| | CGCTCCGAAAGTTTCCTTTTATGGCGAGGCGGCGGCGGCGGCGGCCCTATAAAAA | |
| | GCGAAGCGCGCGGCGGGAAGCTTCGTTTAGTGAACCGTCAGATCACCTGGAGACA | |
| | CCATCCACACTGTTTTGACCTCCATAGAAGACACCAGGACCAATCCAGCCTCCAC | |
| | AGATTCCAATCCCAGCCAGGAACAGTGCATTGGAACACAGATTCCCCTTGCCAAG | |
| | AGTGACGTAAGTACCGCCTATAGAGTCTATAGGCCCACAAAAAATGCTTTCTTCT | |
| | TTTAATATACTTTTTTGTTTATCTTATTTCTAATACTTTCCCTAATCTCTTTCTT | |
| | TCAGGGCAATAATGATACAATGTATCATGCCTCTTTGCACCATTCTAAAGAATAA | |
| | CAGTGATAATTTCTGGGTTAAGGCAATAGCAATATTTCTGCATATAAATATTTCT | |
| | GCATATAAATTGTAACTGATGTAAGAGGTTTCATATTGCTAATAGCAGCTACAAT | |
| | CCAGCTACCATTCTGCTTTTATTTTATGGTTGGGATAAGGCTGGATTATTCTGAG | |
| | TCCAAGCTAGGCCCTTTTGCTAATCATGTTCATACCTCTTATCTTCCTCCCACAG | |
| | CTCCTGGGCAACCTGCTGGTCTGTGTGCTGGCCCATCACTTTGGCAAAGAATTGG | |
| | GATTCGAACCGGTACCGAGCTCTCCCGCAGAACACCATGCGCTCCACGGAAGCAG | |
| | GTCCTCACTTTAATGCTGTGGCCACTGAGAAGTATTAAAGTGAGGACCTGCTTCT | |
| | GAGGAGCGCCTTGACAGCAGCCATGGGAGGGCCTCGAGGGGTGGCATCCCTGTGA | |
| | CCCCTCCCCAGTGCCTCTCCTGGCCCTGGAAGTTGCCACTCCAGTGCCCACCAGC | |
| | CTTGTCCTAATAAAATTAAGTTGCATCATTTTGTCTGACTAGGTGTCCTTCTATA | |
| | ATATTATGGGGTGGAGGGGGGTGGTATGGAGCAAGGGGCAAGTTGGGAAGACAAC | |
| | CTGTAGGGCCTGCGGGGTCTATTGGGAACCAAGCTGGAGTGCAGTGGCACAATCT | |
| | TGGCTCACTGCAATCTCCGCCTCCTGGGTTCAAGCGATTCTCCTGCCTCAGCCTC | |
| | CCGAGTTGTTGGGATTCCAGGCATGCATGACCAGGCTCAGCTAATTTTTGTTTTT | |
| | TTGGTAGAGACGGGGTTTCACCATATTGGCCAGGCTGGTCTCCAACTCCTAATCT | |
| | CAGGTGATCTACCCACCTTGGCCTCCCAAATTGCTGGGATTACAGGCGTGAACCA | |
| | CTGCTCCCTTCCCTGTCCTTATCGATGCCTAGGGTTAATCATTAACTACAAGGAA | |
| | CCCCTAGTGATGGAGTTGGCCACTCCCTCTCTGCGCGCTCGCTCGCTCACTGAGG | |
| | CCGGGCGACCAAAGGTCGCCCGACGCCCGGGCTTTGCCCGGGCGGCCTCAGTGAG | |
| | CGAGCGAGCGCGCAG | |
| ITR to ITR of | CTGCGCGCTCGCTCGCTCACTGAGGCCGCCCGGGCAAAGCCCGGGCGTCGGGCGA | 4037 |
| miniEF1aV2.mir10 | CCTTTGGTCGCCCGGCCTCAGTGAGCGAGCGAGCGCGCAGAGAGGGAGTGTAGCC | |
| 4-788.2 with CpG | ATGCTCTAGGAAGATCAATTCAATTCACGCGTCGTGAGGCTCCGGTGCCCGTCAG | |
| deleted hBG | TGGGCAGAGCGCACATCGCCCACAGTCCCCGAGAAGTTGGGGGGAGGGGTCGGCA | |
| exon/intron/exon | ATTGAACCGGTGCCTAGAGAAGGTGGCGCGGGGTAAACTGGGAAAGTGATGTCGT | |
| (construct 10) | GTACTGGCTCCGCCTTTTTCCCGAGGGTGGGGGAGAACCGTATATAAGTGCAGTA | |
| | GTCGCCGTGAACGTTCTTTTTCGCAACGGGTTTGCCGCCAGAACACAGAAGCTTC | |
| | GTTTAGTGAACCGTCAGATCACCTGGAGACACCATCCACACTGTTTTGACCTCCA | |
| | TAGAAGACACCAGGACCAATCCAGCCTCCACAGATTCCAATCCCAGCCAGGAACA | |
| | GTGCATTGGAACACAGATTCCCCTTGCCAAGAGTGACGTAAGTACCGCCTATAGA | |
| | GTCTATAGGCCCACAAAAAATGCTTTCTTCTTTTAATATACTTTTTTGTTTATCT | |
| | TATTTCTAATACTTTCCCTAATCTCTTTCTTTCAGGGCAATAATGATACAATGTA | |
| | TCATGCCTCTTTGCACCATTCTAAAGAATAACAGTGATAATTTCTGGGTTAAGGC | |
| | AATAGCAATATTTCTGCATATAAATATTTCTGCATATAAATTGTAACTGATGTAA | |
| | GAGGTTTCATATTGCTAATAGCAGCTACAATCCAGCTACCATTCTGCTTTTATTT | |
| | TATGGTTGGGATAAGGCTGGATTATTCTGAGTCCAAGCTAGGCCCTTTTGCTAAT | |
| | CATGTTCATACCTCTTATCTTCCTCCCACAGCTCCTGGGCAACCTGCTGGTCTGT | |
| | GTGCTGGCCCATCACTTTGGCAAAGAATTGGGATTCGAACCGGTACCGAGCTCTC | |
| | CCGCAGAACACCATGCGCTCCACGGAAGCAGGTCCTCACTTTAATGCTGTGGCCA | |
| | CTGAGAAGTATTAAAGTGAGGACCTGCTTCTGAGGAGCGCCTTGACAGCAGCCAT | |
| | GGGAGGGCCTCGAGGGGTGGCATCCCTGTGACCCCTCCCCAGTGCCTCTCCTGGC | |
| | CCTGGAAGTTGCCACTCCAGTGCCCACCAGCCTTGTCCTAATAAAATTAAGTTGC | |
| | ATCATTTTGTCTGACTAGGTGTCCTTCTATAATATTATGGGGTGGAGGGGGGTGG | |
| | TATGGAGCAAGGGGCAAGTTGGGAAGACAACCTGTAGGGCCTGCGGGGTCTATTG | |
| | GGAACCAAGCTGGAGTGCAGTGGCACAATCTTGGCTCACTGCAATCTCCGCCTCC | |
| | TGGGTTCAAGCGATTCTCCTGCCTCAGCCTCCCGAGTTGTTGGGATTCCAGGCAT | |
| | GCATGACCAGGCTCAGCTAATTTTTGTTTTTTTGGTAGAGACGGGGTTTCACCAT | |
| | ATTGGCCAGGCTGGTCTCCAACTCCTAATCTCAGGTGATCTACCCACCTTGGCCT | |
| | CCCAAATTGCTGGGATTACAGGCGTGAACCACTGCTCCCTTCCCTGTCCTTATCG | |
| | ATGCCTAGGGTTAATCATTAACTACAAGGAACCCCTAGTGATGGAGTTGGCCACT | |
| | CCCTCTCTGCGCGCTCGCTCGCTCACTGAGGCCGGGCGACCAAAGGTCGCCCGAC | |
| | GCCCGGGCTTTGCCCGGGCGGCCTCAGTGAGCGAGCGAGCGCGCAG | |
| ITR to ITR of | CTGCGCGCTCGCTCGCTCACTGAGGCCGCCCGGGCAAAGCCCGGGCGTCGGGCGA | 4038 |
| PGK.mir104-788.2 | CCTTTGGTCGCCCGGCCTCAGTGAGCGAGCGAGCGCGCAGAGAGGGAGTGTAGCC | |
| with CpG deleted | ATGCTCTAGGAAGATCAATTCAATTCACGCGTGGGTAGGGGAGGCGCTTTTCCCA | |
| hBG | AGGCAGTCTGGAGCATGCGCTTTAGCAGCCCCGCTGGGCACTTGGCGCTACACAA | |
| exon/intron/exon | GTGGCCTCTGGCCTCGCACACATTCCACATCCACCGGTAGGCGCCAACCGGCTCC | |
| (construct 11) | GTTCTTTGGTGGCCCCTTCGCGCCACCTTCTACTCCTCCCCTAGTCAGGAAGTTC | |
| | CCCCCCGCCCCGCAGCTCGCGTCGTGCAGGACGTGACAAATGGAAGTAGCACGTC | |
| | TCACTAGTCTCGTGCAGATGGACAGCACCGCTGAGCAATGGAAGCGGGTAGGCCT | |
| | TTGGGGCAGCGGCCAATAGCAGCTTTGCTCCTTCGCTTTCTGGGCTCAGAGGCTG | |
| | GGAAGGGGTGGGTCCGGGGGCGGGCTCAGGGGCGGGCTCAGGGGCGGGGCGGGCG | |
| | CCCGAAGGTCCTCCGGAGGCCCGGCATTCTGCACGCTTCAAAAGCGCACGTCTGC | |
| | CGCGCTGTTCTCCTCTTCCTCATCTCCGGGCCTTTCGAAGCTTCGTTTAGTGAAC | |
| | CGTCAGATCACCTGGAGACACCATCCACACTGTTTTGACCTCCATAGAAGACACC | |
| | AGGACCAATCCAGCCTCCACAGATTCCAATCCCAGCCAGGAACAGTGCATTGGAA | |
| | CACAGATTCCCCTTGCCAAGAGTGACGTAAGTACCGCCTATAGAGTCTATAGGCC | |
| | CACAAAAAATGCTTTCTTCTTTTAATATACTTTTTTGTTTATCTTATTTCTAATA | |
| | CTTTCCCTAATCTCTTTCTTTCAGGGCAATAATGATACAATGTATCATGCCTCTT | |
| | TGCACCATTCTAAAGAATAACAGTGATAATTTCTGGGTTAAGGCAATAGCAATAT | |
| | TTCTGCATATAAATATTTCTGCATATAAATTGTAACTGATGTAAGAGGTTTCATA | |
| | TTGCTAATAGCAGCTACAATCCAGCTACCATTCTGCTTTTATTTTATGGTTGGGA | |
| | TAAGGCTGGATTATTCTGAGTCCAAGCTAGGCCCTTTTGCTAATCATGTTCATAC | |
| | CTCTTATCTTCCTCCCACAGCTCCTGGGCAACCTGCTGGTCTGTGTGCTGGCCCA | |
| | TCACTTTGGCAAAGAATTGGGATTCGAACCGGTACCGAGCTCTCCCGCAGAACAC | |
| | CATGCGCTCCACGGAAGCAGGTCCTCACTTTAATGCTGTGGCCACTGAGAAGTAT | |
| | TAAAGTGAGGACCTGCTTCTGAGGAGCGCCTTGACAGCAGCCATGGGAGGGCCTC | |
| | GAGGGGTGGCATCCCTGTGACCCCTCCCCAGTGCCTCTCCTGGCCCTGGAAGTTG | |
| | CCACTCCAGTGCCCACCAGCCTTGTCCTAATAAAATTAAGTTGCATCATTTTGTC | |
| | TGACTAGGTGTCCTTCTATAATATTATGGGGTGGAGGGGGGTGGTATGGAGCAAG | |
| | GGGCAAGTTGGGAAGACAACCTGTAGGGCCTGCGGGGTCTATTGGGAACCAAGCT | |
| | GGAGTGCAGTGGCACAATCTTGGCTCACTGCAATCTCCGCCTCCTGGGTTCAAGC | |
| | GATTCTCCTGCCTCAGCCTCCCGAGTTGTTGGGATTCCAGGCATGCATGACCAGG | |
| | CTCAGCTAATTTTTGTTTTTTTGGTAGAGACGGGGTTTCACCATATTGGCCAGGC | |
| | TGGTCTCCAACTCCTAATCTCAGGTGATCTACCCACCTTGGCCTCCCAAATTGCT | |
| | GGGATTACAGGCGTGAACCACTGCTCCCTTCCCTGTCCTTATCGATGCCTAGGGT | |
| | TAATCATTAACTACAAGGAACCCCTAGTGATGGAGTTGGCCACTCCCTCTCTGCG | |
| | CGCTCGCTCGCTCACTGAGGCCGGGCGACCAAAGGTCGCCCGACGCCCGGGCTTT | |
| | GCCCGGGCGGCCTCAGTGAGCGAGCGAGCGCGCAG | |
| ITR to ITR of | CTGCGCGCTCGCTCGCTCACTGAGGCCGCCCGGGCAAAGCCCGGGCGTCGGGCGA | 4039 |
| MP84.mir104- | CCTTTGGTCGCCCGGCCTCAGTGAGCGAGCGAGCGCGCAGAGAGGGAGTGTAGCC | |
| 788.2 with CpG | ATGCTCTAGGAAGATCAATTCAATTCACGCGTCCCTAATGGGCCAGGCGGCAGGG | |
| deleted hBG | GTTGAGAGGTAGGGGAGATGGGCTCTGAGACTATAAAGCCAGCGGGGGCCCAGCA | |
| exon/intron/exon | GCCCTCAAGCTTCGTTTAGTGAACCGTCAGATCACCTGGAGACACCATCCACACT | |
| (construct 12) | GTTTTGACCTCCATAGAAGACACCAGGACCAATCCAGCCTCCACAGATTCCAATC | |
| | CCAGCCAGGAACAGTGCATTGGAACACAGATTCCCCTTGCCAAGAGTGACGTAAG | |
| | TACCGCCTATAGAGTCTATAGGCCCACAAAAAATGCTTTCTTCTTTTAATATACT | |
| | TTTTTGTTTATCTTATTTCTAATACTTTCCCTAATCTCTTTCTTTCAGGGCAATA | |
| | ATGATACAATGTATCATGCCTCTTTGCACCATTCTAAAGAATAACAGTGATAATT | |
| | TCTGGGTTAAGGCAATAGCAATATTTCTGCATATAAATATTTCTGCATATAAATT | |
| | GTAACTGATGTAAGAGGTTTCATATTGCTAATAGCAGCTACAATCCAGCTACCAT | |
| | TCTGCTTTTATTTTATGGTTGGGATAAGGCTGGATTATTCTGAGTCCAAGCTAGG | |
| | CCCTTTTGCTAATCATGTTCATACCTCTTATCTTCCTCCCACAGCTCCTGGGCAA | |
| | CCTGCTGGTCTGTGTGCTGGCCCATCACTTTGGCAAAGAATTGGGATTCGAACCG | |
| | GTACCGAGCTCTCCCGCAGAACACCATGCGCTCCACGGAAGCAGGTCCTCACTTT | |
| | AATGCTGTGGCCACTGAGAAGTATTAAAGTGAGGACCTGCTTCTGAGGAGCGCCT | |
| | TGACAGCAGCCATGGGAGGGCCTCGAGGGGTGGCATCCCTGTGACCCCTCCCCAG | |
| | TGCCTCTCCTGGCCCTGGAAGTTGCCACTCCAGTGCCCACCAGCCTTGTCCTAAT | |
| | AAAATTAAGTTGCATCATTTTGTCTGACTAGGTGTCCTTCTATAATATTATGGGG | |
| | TGGAGGGGGGTGGTATGGAGCAAGGGGCAAGTTGGGAAGACAACCTGTAGGGCCT | |
| | GCGGGGTCTATTGGGAACCAAGCTGGAGTGCAGTGGCACAATCTTGGCTCACTGC | |
| | AATCTCCGCCTCCTGGGTTCAAGCGATTCTCCTGCCTCAGCCTCCCGAGTTGTTG | |
| | GGATTCCAGGCATGCATGACCAGGCTCAGCTAATTTTTGTTTTTTTGGTAGAGAC | |
| | GGGGTTTCACCATATTGGCCAGGCTGGTCTCCAACTCCTAATCTCAGGTGATCTA | |
| | CCCACCTTGGCCTCCCAAATTGCTGGGATTACAGGCGTGAACCACTGCTCCCTTC | |
| | CCTGTCCTTATCGATGCCTAGGGTTAATCATTAACTACAAGGAACCCCTAGTGAT | |
| | GGAGTTGGCCACTCCCTCTCTGCGCGCTCGCTCGCTCACTGAGGCCGGGCGACCA | |
| | AAGGTCGCCCGACGCCCGGGCTTTGCCCGGGCGGCCTCAGTGAGCGAGCGAGCGC | |
| | GCAG | |
| ITR to ITR of | CTGCGCGCTCGCTCGCTCACTGAGGCCGCCCGGGCAAAGCCCGGGCGTCGGGCGA | 4040 |
| hSYN(long).mir10 | CCTTTGGTCGCCCGGCCTCAGTGAGCGAGCGAGCGCGCAGAGAGGGAGTGTAGCC | |
| 4-788.2 with CpG | ATGCTCTAGGAAGATCAATTCAATTCACGCGTCGCGTGGGGTTATTTCTCTACTT | |
| deleted hBG | TCGTGTCTCTGAGTGTGCTTCCAGTGCCCCCCTCCCCCCAAAAAATGCCTTCTGA | |
| exon/intron/exon | GTTGAATATCAACACTACAAACCTAGTATCTGCAGAGGGCCCTGCGTATGAGTGC | |
| (construct 13) | AAGTGGGTTTTAGGACCAGGATGAGGCGGGGTGGGGGTGCCTACCTGACGACCGA | |
| | CCCCGACCCACTGGACAAGCACCCAACCCCCATTCCCCAAATTGCGCATCCCCTA | |
| | TCAGAGAGGGGGAGGGGAAACAGGATGCGGCGAGGCGCGTGCGCACTGCCAGCTT | |
| | CAGCACCGCGGACAGTGCCTTCGCCCCCGCCTGGCGGCGCGCGCCACCGCCGCCT | |
| | CAGCACTGAAGGCGCGCTGACGTCACTCGCCGGTCCCCCGCAAACTCCCCTTCCC | |
| | GGCCACCTTGGTCGCGTCCGCGCCGCCGCCGGCCCAGCCGGACCGCACCACGCGA | |
| | GGCGCGAGATAGGGGGGCACGGGCGCGACCATCTGCGCTGCGGCGCCGGCGACTC | |
| | AGCGCTGCCTCAGTCTGCGGTGGGCAGCGGAGGAGTCGTGTCGTGCCTGAGAGCG | |
| | CAGCTGTGCTCCTGGGCACCGCGCAGTCCGCCCCCGCGGCTCCTGGCCAGACCAC | |
| | CCCTAGGACCCCCTGCCCCAAGTCGCAGCCAAGCTTCGTTTAGTGAACCGTCAGA | |
| | TCACCTGGAGACACCATCCACACTGTTTTGACCTCCATAGAAGACACCAGGACCA | |
| | ATCCAGCCTCCACAGATTCCAATCCCAGCCAGGAACAGTGCATTGGAACACAGAT | |
| | TCCCCTTGCCAAGAGTGACGTAAGTACCGCCTATAGAGTCTATAGGCCCACAAAA | |
| | AATGCTTTCTTCTTTTAATATACTTTTTTGTTTATCTTATTTCTAATACTTTCCC | |
| | TAATCTCTTTCTTTCAGGGCAATAATGATACAATGTATCATGCCTCTTTGCACCA | |
| | TTCTAAAGAATAACAGTGATAATTTCTGGGTTAAGGCAATAGCAATATTTCTGCA | |
| | TATAAATATTTCTGCATATAAATTGTAACTGATGTAAGAGGTTTCATATTGCTAA | |
| | TAGCAGCTACAATCCAGCTACCATTCTGCTTTTATTTTATGGTTGGGATAAGGCT | |
| | GGATTATTCTGAGTCCAAGCTAGGCCCTTTTGCTAATCATGTTCATACCTCTTAT | |
| | CTTCCTCCCACAGCTCCTGGGCAACCTGCTGGTCTGTGTGCTGGCCCATCACTTT | |
| | GGCAAAGAATTGGGATTCGAACCGGTACCGAGCTCTCCCGCAGAACACCATGCGC | |
| | TCCACGGAAGCAGGTCCTCACTTTAATGCTGTGGCCACTGAGAAGTATTAAAGTG | |
| | AGGACCTGCTTCTGAGGAGCGCCTTGACAGCAGCCATGGGAGGGCCTCGAGGGGT | |
| | GGCATCCCTGTGACCCCTCCCCAGTGCCTCTCCTGGCCCTGGAAGTTGCCACTCC | |
| | AGTGCCCACCAGCCTTGTCCTAATAAAATTAAGTTGCATCATTTTGTCTGACTAG | |
| | GTGTCCTTCTATAATATTATGGGGTGGAGGGGGGTGGTATGGAGCAAGGGGCAAG | |
| | TTGGGAAGACAACCTGTAGGGCCTGCGGGGTCTATTGGGAACCAAGCTGGAGTGC | |
| | AGTGGCACAATCTTGGCTCACTGCAATCTCCGCCTCCTGGGTTCAAGCGATTCTC | |
| | CTGCCTCAGCCTCCCGAGTTGTTGGGATTCCAGGCATGCATGACCAGGCTCAGCT | |
| | AATTTTTGTTTTTTTGGTAGAGACGGGGTTTCACCATATTGGCCAGGCTGGTCTC | |
| | CAACTCCTAATCTCAGGTGATCTACCCACCTTGGCCTCCCAAATTGCTGGGATTA | |
| | CAGGCGTGAACCACTGCTCCCTTCCCTGTCCTTATCGATGCCTAGGGTTAATCAT | |
| | TAACTACAAGGAACCCCTAGTGATGGAGTTGGCCACTCCCTCTCTGCGCGCTCGC | |
| | TCGCTCACTGAGGCCGGGCGACCAAAGGTCGCCCGACGCCCGGGCTTTGCCCGGG | |
| | CGGCCTCAGTGAGCGAGCGAGCGCGCAG | |
| ITR to ITR of | CTGCGCGCTCGCTCGCTCACTGAGGCCGCCCGGGCAAAGCCCGGGCGTCGGGCGA | 4041 |
| hSYN(short).mir10 | CCTTTGGTCGCCCGGCCTCAGTGAGCGAGCGAGCGCGCAGAGAGGGAGTGTAGCC | |
| 4-788.2 with CpG | ATGCTCTAGGAAGATCAATTCAATTCACGCGTTAGTATCTGCAGAGGGCCCTGCG | |
| deleted hBG | TATGAGTGCAAGTGGGTTTTAGGACCAGGATGAGGCGGGGTGGGGGTGCCTACCT | |
| exon/intron/exon | GACGACCGACCCCGACCCACTGGACAAGCACCCAACCCCCATTCCCCAAATTGCG | |
| (construct 14) | CATCCCCTATCAGAGAGGGGGAGGGGAAACAGGATGCGGCGAGGCGCGTGCGCAC | |
| | TGCCAGCTTCAGCACCGCGGACAGTGCCTTCGCCCCCGCCTGGCGGCGCGCGCCA | |
| | CCGCCGCCTCAGCACTGAAGGCGCGCTGACGTCACTCGCCGGTCCCCCGCAAACT | |
| | CCCCTTCCCGGCCACCTTGGTCGCGTCCGCGCCGCCGCCGGCCCAGCCGGACCGC | |
| | ACCACGCGAGGCGCGAGATAGGGGGGCACGGGCGCGACCATCTGCGCTGCGGCGC | |
| | CGGCGACTCAGCGCTGCCTCAGTCTGCGGTGGGCAGCGGAGGAGTCGTGTCGTGC | |
| | CTGAGAGCGCAGCTGTGCTCCTGGGCACCGCGCAGTCCGCCCCCGCGGCTCCTGG | |
| | CCAGACCACCCCTAGGACCCCCTGCCCCAAGTCGCAGCCAAGCTTCGTTTAGTGA | |
| | ACCGTCAGATCACCTGGAGACACCATCCACACTGTTTTGACCTCCATAGAAGACA | |
| | CCAGGACCAATCCAGCCTCCACAGATTCCAATCCCAGCCAGGAACAGTGCATTGG | |
| | AACACAGATTCCCCTTGCCAAGAGTGACGTAAGTACCGCCTATAGAGTCTATAGG | |
| | CCCACAAAAAATGCTTTCTTCTTTTAATATACTTTTTTGTTTATCTTATTTCTAA | |
| | TACTTTCCCTAATCTCTTTCTTTCAGGGCAATAATGATACAATGTATCATGCCTC | |
| | TTTGCACCATTCTAAAGAATAACAGTGATAATTTCTGGGTTAAGGCAATAGCAAT | |
| | ATTTCTGCATATAAATATTTCTGCATATAAATTGTAACTGATGTAAGAGGTTTCA | |
| | TATTGCTAATAGCAGCTACAATCCAGCTACCATTCTGCTTTTATTTTATGGTTGG | |
| | GATAAGGCTGGATTATTCTGAGTCCAAGCTAGGCCCTTTTGCTAATCATGTTCAT | |
| | ACCTCTTATCTTCCTCCCACAGCTCCTGGGCAACCTGCTGGTCTGTGTGCTGGCC | |
| | CATCACTTTGGCAAAGAATTGGGATTCGAACCGGTACCGAGCTCTCCCGCAGAAC | |
| | ACCATGCGCTCCACGGAAGCAGGTCCTCACTTTAATGCTGTGGCCACTGAGAAGT | |
| | ATTAAAGTGAGGACCTGCTTCTGAGGAGCGCCTTGACAGCAGCCATGGGAGGGCC | |
| | TCGAGGGGTGGCATCCCTGTGACCCCTCCCCAGTGCCTCTCCTGGCCCTGGAAGT | |
| | TGCCACTCCAGTGCCCACCAGCCTTGTCCTAATAAAATTAAGTTGCATCATTTTG | |
| | TCTGACTAGGTGTCCTTCTATAATATTATGGGGTGGAGGGGGGTGGTATGGAGCA | |
| | AGGGGCAAGTTGGGAAGACAACCTGTAGGGCCTGCGGGGTCTATTGGGAACCAAG | |
| | CTGGAGTGCAGTGGCACAATCTTGGCTCACTGCAATCTCCGCCTCCTGGGTTCAA | |
| | GCGATTCTCCTGCCTCAGCCTCCCGAGTTGTTGGGATTCCAGGCATGCATGACCA | |
| | GGCTCAGCTAATTTTTGTTTTTTTGGTAGAGACGGGGTTTCACCATATTGGCCAG | |
| | GCTGGTCTCCAACTCCTAATCTCAGGTGATCTACCCACCTTGGCCTCCCAAATTG | |
| | CTGGGATTACAGGCGTGAACCACTGCTCCCTTCCCTGTCCTTATCGATGCCTAGG | |
| | GTTAATCATTAACTACAAGGAACCCCTAGTGATGGAGTTGGCCACTCCCTCTCTG | |
| | CGCGCTCGCTCGCTCACTGAGGCCGGGCGACCAAAGGTCGCCCGACGCCCGGGCT | |
| | TTGCCCGGGCGGCCTCAGTGAGCGAGCGAGCGCGCAG | |

TABLE 18
Summary of components of the ITR to ITR sequences of AAV Particles in Table 17

| Construct | | | | | hGH poly | |
|---|---|---|---|---|---|---|
| (from | | | hβG | Modulatory | A signal | |
| Table 17) | 5′ITR | Promoter | Exon/Intron/Exon | polynucleotide | sequence | 3′ITR |
| 1 | SEQ ID: | SEQ ID: | SEQ ID NO: 4042 | SEQ ID NO: | SEQ ID | SEQ ID: |
| (SEQ ID | 126 | 4021 | | 2562 | NO: 4027 | 130 |
| NO: 4028) | | | | | | |
| 2 | SEQ ID: | SEQ ID: | SEQ ID NO: 4042 | SEQ ID NO: | SEQ ID | SEQ ID: |
| (SEQ ID | 126 | 4022 | | 2562 | NO: 4027 | 130 |
| NO: 4029) | | | | | | |
| 3 | SEQ ID: | SEQ ID: | SEQ ID NO: 4042 | SEQ ID NO: | SEQ ID | SEQ ID: |
| (SEQ ID | 126 | 4014 | | 2562 | NO: 4027 | 130 |
| NO: 4030) | | | | | | |
| 4 | SEQ ID: | SEQ ID: | SEQ ID NO: 4042 | SEQ ID NO: | SEQ ID | SEQ ID: |
| (SEQ ID | 126 | 4023 | | 2562 | NO: 4027 | 130 |
| NO: 4031) | | | | | | |
| 5 | SEQ ID: | SEQ ID: | SEQ ID NO: 4042 | SEQ ID NO: | SEQ ID | SEQ ID: |
| (SEQ ID | 126 | 4024 | | 2562 | NO: 4027 | 130 |
| NO: 4032) | | | | | | |
| 6 | SEQ ID: | SEQ ID: | SEQ ID NO: 4042 | SEQ ID NO: | SEQ ID | SEQ ID: |
| (SEQ ID | 126 | 4025 | | 2562 | NO: 4027 | 130 |
| NO: 4033) | | | | | | |
| 7 | SEQ ID: | SEQ ID: | SEQ ID NO: 4042 | SEQ ID NO: | SEQ ID | SEQ ID: |
| (SEQ ID | 126 | 4026 | | 2562 | NO: 4027 | 130 |
| NO: 4034) | | | | | | |
| 8 | SEQ ID: | SEQ ID: | SEQ ID NO: 4043 | SEQ ID NO: | SEQ ID | SEQ ID: |
| (SEQ ID | 126 | 4021 | | 2562 | NO: 4027 | 130 |
| NO: 4035) | | | | | | |
| 9 | SEQ ID: | SEQ ID: | SEQ ID NO: 4043 | SEQ ID NO: | SEQ ID | SEQ ID: |
| (SEQ ID | 126 | 4022 | | 2562 | NO: 4027 | 130 |
| NO: 4036) | | | | | | |
| 10 | SEQ ID: | SEQ ID: | SEQ ID NO: 4043 | SEQ ID NO: | SEQ ID | SEQ ID: |
| (SEQ ID | 126 | 4014 | | 2562 | NO: 4027 | 130 |
| NO: 4037) | | | | | | |
| 11 | SEQ ID: | SEQ ID: | SEQ ID NO: 4043 | SEQ ID NO: | SEQ ID | SEQ ID: |
| (SEQ ID | 126 | 4023 | | 2562 | NO: 4027 | 130 |
| NO: 4038) | | | | | | |
| 12 | SEQ ID: | SEQ ID: | SEQ ID NO: 4043 | SEQ ID NO: | SEQ ID | SEQ ID: |
| (SEQ ID | 126 | 4024 | | 2562 | NO: 4027 | 130 |
| NO: 4039) | | | | | | |
| 13 | SEQ ID: | SEQ ID: | SEQ ID NO: 4043 | SEQ ID NO: | SEQ ID | SEQ ID: |
| (SEQ ID | 126 | 4025 | | 2562 | NO: 4027 | 130 |
| NO: 4040) | | | | | | |
| 14 | SEQ ID: | SEQ ID: | SEQ ID NO: 4043 | SEQ ID NO: | SEQ ID | SEQ ID: |
| (SEQ ID | 126 | 4026 | | 2562 | NO: 4027 | 130 |
| NO: 4041) | | | | | | |

[1427] In certain embodiments, the AAV particle comprises a viral genome which comprises a sequence which has a percent identity to SEQ ID NO: 109. The viral genome may have at least 70%, 75%, 80%, 85%, 90%, 95%, 99% or 100% identity to SEQ ID NO: 9. The viral genome may have 70-80%, 70-90%, 70-99%, 70-100%, 80-85%, 80-90%, 80-95%, 80-99%, 80-100%, 90-95%, 90-99%, or 90-100% identity to SEQ ID NO: 109. As a non-limiting example, the viral genome comprises a sequence which has at least 80% identity to SEQ ID NO: 109. As another non-limiting example, the viral genome comprises a sequence which has at least 85% identity to SEQ ID NO: 109. As another non-limiting example, the viral genome comprises a sequence which has at least 90% identity to SEQ ID NO: 109. As another non-limiting example, the viral genome comprises a sequence which has at least 95% identity to SEQ ID NO: 109. As another non-limiting example, the viral genome comprises a sequence which has at least 99% identity to SEQ ID NO: 109. In some embodiments, the AAV particle comprises the viral genome sequence of SEQ ID NO: 109 differing by no more than 15, 14, 13, 12, 11, 10, 9, 8, 7, 6, 5, 4, 3, 2 or 1 nucleotides from SEQ ID NO: 109. These differing nucleotides may be contiguous, or alternatively, they may be non-contiguous throughout the sequence. In some embodiments, the differing nucleotides are located at the ends of the sequences.

[1428] In certain embodiments, the AAV particle comprises a viral genome which comprises a sequence which has a percent identity to SEQ ID NO: 125. The viral genome may have at least 70%, 75%, 80%, 85%, 90%, 95%, 99% or 100% identity to SEQ ID NO: 125. The viral genome may have 70-80%, 70-90%, 70-99%, 70-100%, 80-85%, 80-90%, 80-95%, 80-99%, 80-100%, 90-95%, 90-99%, or 90-100% identity to SEQ ID NO: 125. As a non-limiting example, the viral genome comprises a sequence which has at least 80% identity to SEQ ID NO: 125. As another non-limiting example, the viral genome comprises a sequence which has at least 85% identity to SEQ ID NO: 125. As another non-limiting example, the viral genome comprises a sequence which has at least 90% identity to SEQ ID NO: 125. As another non-limiting example, the viral genome comprises a sequence which has at least 95% identity to SEQ ID NO: 125. As another non-limiting example, the viral genome comprises a sequence which has at least 99% identity to SEQ ID NO: 125. In some embodiments, the AAV particle comprises the viral genome sequence of SEQ ID NO: 125 differing by no more than 15, 14, 13, 12, 11, 10, 9, 8, 7, 6, 5, 4, 3, 2 or 1 nucleotides from SEQ ID NO: 125. These differing nucleotides may be contiguous, or alternatively, they may be non-contiguous throughout the sequence. In some embodiments, the differing nucleotides are located at the ends of the sequences.

[1429] In certain embodiments, the AAV particle comprises a viral genome which comprises a nucleotide sequence which has a percent identity to any one of SEQ ID NOs: 4028-4041. The viral genome may have at least 70%, 75%, 80%, 85%, 90%, 95%, 99% or 100% identity to any one of SEQ ID NOs: 4028-4041. The viral genome may have 70-80%, 70-90%, 70-99%, 70-100%, 80-85%, 80-90%, 80-95%, 80-99%, 80-100%, 90-95%, 90-99%, or 90-100% identity to any one of SEQ ID NOs: 4028-4041. As a non-limiting example, the viral genome comprises a nucleotide sequence which has at least 80% identity to any one of SEQ ID NOs: 4028-4041. As another non-limiting example, the viral genome comprises a nucleotide sequence which has at least 85% identity to any one of SEQ ID NOs: 4028-4041. As another non-limiting example, the viral genome comprises a nucleotide sequence which has at least 90% identity to any one of SEQ ID NOs: 4028-4041. As another non-limiting example, the viral genome comprises a nucleotide sequence which has at least 95% identity to any one of SEQ ID NOs: 4028-4041. As another non-limiting example, the viral genome comprises a nucleotide sequence which has at least 99% identity to any one of SEQ ID NOs: 4028-4041. In some embodiments, the AAV particle comprises a viral genome sequence differing by no more than 15, 14, 13, 12, 11, 10, 9, 8, 7, 6, 5, 4, 3, 2 or 1 nucleotides relative to any one of SEQ ID NOs: 4028-4041. These differing nucleotides may be contiguous, or alternatively, they may be non-contiguous throughout the sequence. In some embodiments, the differing nucleotides are located at the ends of the sequences.

[1430] In some embodiments, the modulatory polynucleotide sequence of any one of SEQ ID NOs: 4028-4041 is located within (e.g., inserted into) the intron, or replaces a part or all of the intron, of the hβG exon-intron-exon cassette rather than being located 3′ relative to the hβG exon-intron-exon cassette. In some embodiments, one or more of the 5′ ITR, promoter, exon-intron-exon cassette, nucleotide sequence encoding the modulatory polynucleotide, polyA signal sequence, and 3′ITR of the ITR to ITR sequences of any one of SEQ ID NOs: 4028-4041 in Tables 17 and 18 can be replaced with a variant 5′ ITR, promoter, exon-intron-exon cassette, nucleotide sequence encoding the modulatory polynucleotide, polyA signal sequence, and/or 3′ITR sequence, e.g., one or more variant components comprising a nucleotide sequence having at least one, two, or three but no more than four modifications (e.g., substitutions, insertions, and/or deletions) relative to the nucleotide sequence of the non-modified version of the component or components, or a nucleotide sequence with at least 70% (e.g., 80, 85%, 90%, 95%, 96%, 97%, 98%, or 99%) sequence identity to the non-modified version of the component or components.

[1431] In some embodiments, the AAV particle comprises a viral genome which comprises, from 5′ to 3′: a 5′ ITR, a promoter (e.g., promoter of CBA, mini-CBA, EF-1, PGK, MP84, SYN, or a variant (e.g., truncated version) of any of the preceding promoters), an exon-intron-exon cassette (e.g., from hβG), a nucleotide sequence encoding a modulatory polynucleotide, wherein the modulatory polynucleotide comprises an siRNA encoding sequence which targets SOD1, a polyA signal sequence (e.g., an rBGpA or hGH poly A signal sequence), and 3′ITR.

[1432] In some embodiments, the AAV particle comprises a viral genome which comprises, from 5′ to 3′: a 5′ ITR, a promoter (e.g., promoter of CBA, mini-CBA, EF-1, PGK, MP84, SYN, or a variant (e.g., truncated version) of any of the preceding promoters), an exon-intron-exon cassette (e.g., from hβG), a nucleotide sequence encoding a modulatory polynucleotide comprising an siRNA encoding sequence which targets SOD1 (e.g., hSOD1), wherein the modulatory polynucleotide is inserted into or replaces a portion or all of the intron in the exon-intron-exon cassette, a polyA signal sequence (e.g., an rBGpA or hGH poly A signal sequence), and 3′ITR.

[1433] In some embodiments, AAV particle comprises a viral genome which comprises, from 5′ to 3′: a 5′ ITR sequence comprising, e.g., SEQ ID NO: 126, a promoter sequence selected from, e.g., SEQ ID NOs: 4000-4026, an exon-intron-exon cassette selected from e.g., SEQ ID NO: 4023 or 4024, a nucleotide sequence encoding a modulatory polynucleotide comprising an siRNA encoding sequence which targets SOD1 (e.g., hSOD1), a poly A signal sequence selected from, e.g., SEQ ID NO: 129 or 4027, and a 3′ ITR sequence comprising, e.g., SEQ ID NO: 130.

[1434] In some embodiments, AAV particle comprises a viral genome which comprises, from 5′ to 3′: a 5′ ITR sequence comprising, e.g., SEQ ID NO: 126, a promoter sequence selected from, e.g., SEQ ID NOs: 4000-4026, an exon-intron-exon cassette selected from e.g., SEQ ID NO: 4023 or 4024, a nucleotide sequence encoding a modulatory polynucleotide comprising an siRNA encoding sequence which targets SOD1 (e.g., hSOD1), wherein the modulatory polynucleotide is inserted into or replaces a portion or all of the intron in the exon-intron-exon cassette, a poly A signal sequence selected from, e.g., SEQ ID NO: 129 or 4027, and a 3′ ITR sequence comprising, e.g., SEQ ID NO: 130.

[1435] In some embodiments, the viral genome comprises, from 5′ to 3′:
[1436] (a) a 5′ ITR, e.g., a 5′ITR comprising the nucleotide sequence of SEQ ID NO: 126 or 130 or variant thereof,
[1437] (b) a promoter, e.g., a promoter comprising the nucleotide sequence of any one of SEQ ID NOs: 4000-4026 or variant thereof,
[1438] (c) an exon, e.g., an exon comprising the nucleotide sequence of any one of SEQ ID NOs: 4045-4048 or variant thereof,
[1439] (d) a nucleotide sequence encoding a modulatory polynucleotide (e.g., a SOD1 targeting RNA agent, e.g., a siRNA duplex), e.g., a modulatory polynucleotide comprising the nucleotide sequence of any one of SEQ ID NOs: 2559-2579 and 5022 or variant thereof,
[1440] (e) a poly A signal sequence, e.g., a poly A signal sequence comprising the nucleotide sequence of SEQ ID NO: 129 or 4027 or variant thereof, and
[1441] (f) a 3′ITR, e.g., a 3′ITR comprising the nucleotide sequence of SEQ ID NO: 126 or 130 or variant thereof,
[1442] wherein the variant comprises a sequence differing by no more than 15, 14, 13, 12, 11, 10, 9, 8, 7, 6, 5, 4, 3, 2 or 1 nucleotides, e.g., substitutions, insertions, or deletions, relative to the reference sequence, e.g., a reference sequence, or a sequence with at least 70%, 75%, 80%, 85%, 90%, 95%, 99% or 100% identity, relative to the reference sequence, e.g., wherein the reference sequence is a wild-type sequence.

[1443] In some embodiments, the viral genome comprises, from 5′ to 3′:
[1444] (a) a 5′ ITR, e.g., a 5′ITR comprising the nucleotide sequence of SEQ ID NO: 126 or 130 or variant thereof,
[1445] (b) a promoter, e.g., a promoter comprising the nucleotide sequence of any one of SEQ ID NOs: 4000-4026 or variant thereof,
[1446] (c) a first exon, e.g., a first exon comprising the nucleotide sequence of any one of SEQ ID NOs: 4045-4048 or variant thereof,
[1447] (d) an intron, e.g., an intron comprising the nucleotide sequence of SEQ ID NO: 4044 or variant thereof,
[1448] (e) a nucleotide sequence encoding a modulatory polynucleotide (e.g., a SOD1 targeting RNA agent, e.g., a siRNA duplex), e.g., a SOD1 targeting polynucleotide comprising the nucleotide sequence of any one of SEQ ID NOs: 2559-2579 and 5022 or variant thereof,
[1449] (f) a poly A signal sequence, e.g., a poly A signal sequence comprising the nucleotide sequence of SEQ ID NO: 129 or 4027 or variant thereof, and
[1450] (g) a 3′ITR, e.g., a 3′ITR comprising the nucleotide sequence of SEQ ID NO: 126 or 130 or variant thereof,
[1451] wherein the variant comprises a sequence differing by no more than 15, 14, 13, 12, 11, 10, 9, 8, 7, 6, 5, 4, 3, 2 or 1 nucleotides, e.g., substitutions, insertions, or deletions, relative to the reference sequence, e.g., a reference sequence, or a sequence with at least 70%, 75%, 80%, 85%, 90%, 95%, 99% or 100% identity relative to the reference sequence, e.g., wherein the reference sequence is a wild-type sequence.

[1452] In some embodiments, the viral genome comprises, from 5′ to 3′:
[1453] (a) a 5′ ITR, e.g., a 5′ITR comprising the nucleotide sequence of SEQ ID NO: 126 or 130 or variant thereof,
[1454] (b) a promoter, e.g., a promoter comprising the nucleotide sequence of any one of SEQ ID NOs: 4000-4026 or variant thereof,
[1455] (c) a first exon, e.g., a first exon comprising the nucleotide sequence of any one of SEQ ID NOs: 4045-4048 or variant thereof,
[1456] (d) an intron, e.g., an intron comprising the nucleotide sequence of SEQ ID NO: 4044 or variant thereof,
[1457] (e) a second exon, e.g., a second exon comprising the nucleotide sequence of any one of SEQ ID NOs: 4045-4048 or variant thereof, optionally wherein the first and second exons are not the same sequence,
[1458] (f) a nucleotide sequence encoding a modulatory polynucleotide (e.g., a SOD1 targeting RNA agent, e.g., a siRNA duplex), e.g., a SOD1 targeting polynucleotide comprising the nucleotide sequence of any one of SEQ ID NOs: 2559-2579 and 5022 or variant thereof,
[1459] (g) a poly A signal sequence, e.g., a poly A signal sequence comprising the nucleotide sequence of SEQ ID NO: 129 or 4027 or variant thereof, and
[1460] (h) a 3′ITR, e.g., a 3′ITR comprising the nucleotide sequence of SEQ ID NO: 126 or 130 or variant thereof,
[1461] wherein the variant comprises a sequence differing by no more than 15, 14, 13, 12, 11, 10, 9, 8, 7, 6, 5, 4, 3, 2 or 1 nucleotides, e.g., substitutions, insertions, or deletions, relative to the reference sequence, e.g., a reference sequence, or a sequence with at least 70%, 75%, 80%, 85%, 90%, 95%, 99% or 100% identity relative to the reference sequence, e.g., wherein the reference sequence is a wild-type sequence.

[1462] In some embodiments, the viral genome comprises the nucleotide sequence of any one of SEQ ID NOs: 4028-4041, a nucleotide sequence differing by no more than 15, 14, 13, 12, 11, 10, 9, 8, 7, 6, 5, 4, 3, 2 or 1 nucleotides, e.g., substitutions (e.g., conservative substitutions), insertions, or deletions, relative to any one of SEQ ID NOs: 4028-4041, or a nucleotide sequence with at least 70%, 75%, 80%, 85%, 90%, 95%, 99% or 100% identity to any one of SEQ ID NOs: 4028-4041.

[1463] In some embodiments, the AAV particle comprises a 5′ITR sequence which comprises at least 15 (e.g., at least 16, 17, 18, 19, 20, 21, 22, or 23) contiguous nucleotides differing by no more than 3, 2 or 1 nucleotides from the 5′ ITR sequence in Tables 16-18. These differing nucleotides may be contiguous, or alternatively, they may be non-contiguous throughout the sequence. In some embodiments, the differing nucleotides are located at the ends of the sequences. The 5′ITR sequence may have 70-80%, 70-90%, 70-99%, 70-100%, 80-85%, 80-90%, 80-95%, 80-99%, 80-100%, 90-95%, 90-99%, or 90-100% identity to the 5′ ITR sequence in Table 16.

[1464] In some embodiments, the AAV particle comprises a Albumin derived filler sequence which comprises at least 15 (e.g., at least 16, 17, 18, 19, 20, 21, 22, or 23) contiguous nucleotides differing by no more than 3, 2 or 1 nucleotides from the Albumin derived filler sequence in Table 16. These differing nucleotides may be contiguous, or alternatively, they may be non-contiguous throughout the sequence. In some embodiments, the differing nucleotides are located at the ends of the sequences. The Albumin derived filler sequence may have 70-80%, 70-90%, 70-99%, 70-100%, 80-85%, 80-90%, 80-95%, 80-99%, 80-100%, 90-95%, 90-99%, or 90-100% identity to the Albumin derived filler sequence in Table 16.

[1465] In some embodiments, the AAV particle comprises a promoter sequence (e.g., an H1 promoter sequence or a promoter sequence in Table 17, 18 or 7) which comprises at least 15 (e.g., at least 16, 17, 18, 19, 20, 21, 22, or 23) contiguous nucleotides differing by no more than 7, 6, 5, 4, 3, 2 or 1 nucleotides from the H1 promoter sequence in Table 16 or a promoter sequence in Table 17, 18, or 7. These differing nucleotides may be contiguous, or alternatively, they may be non-contiguous throughout the sequence. In some embodiments, the differing nucleotides are located at the ends of the sequences. The promoter sequence (e.g., an H1 promoter sequence or a promoter sequence in Tables 17, 18 or 6) may have 70-80%, 70-90%, 70-99%, 70-100%, 80-85%, 80-90%, 80-95%, 80-99%, 80-100%, 90-95%, 90-99%, or 90-100% identity to the H1 promoter sequence in Table 16 or a promoter sequence in Tables 17, 18 or 7.

[1466] In some embodiments, the AAV particle comprises a first and/or second exon, an intron, or a first exon, intron, and a second exon (“exon-intron-exon cassette”) (e.g., a first and/or second exon, intron, or exon-intron-exon cassette from Tables 17, 18 or 7, e.g., hβG first and/or second exon, intron, or exon-intron-exon cassette) which comprises at least 15 (e.g., at least 16, 17, 18, 19, 20, 21, 22, or 23) contiguous nucleotides differing by no more than 7, 6, 5, 4, 3, 2 or 1 nucleotides from the first and/or second exon, intron, or exon-intron-exon cassette in Tables 17, 18 or 9. These differing nucleotides may be contiguous, or alternatively, they may be non-contiguous throughout the sequence. In some embodiments, the differing nucleotides are located at the ends of the sequences. The first and/or second exon, intron, or exon-intron-exon cassette (e.g., a first and/or second exon, intron, or exon-intron-exon cassette from Tables 17, 18 or 9, e.g., hβG first and/or second exon, intron or exon-intron-exon cassette) may have 70-80%, 70-90%, 70-99%, 70-100%, 80-85%, 80-90%, 80-95%, 80-99%, 80-100%, 90-95%, 90-99%, or 90-100% identity to the first and/or second exon, intron, or exon-intron-exon cassette in Tables 17, 18 or 9.

[1467] In some embodiments, the AAV particle comprises a Poly A sequence which comprises at least 15 (e.g., at least 16, 17, 18, 19, 20, 21, 22, or 23) contiguous nucleotides differing by no more than 3, 2 or 1 nucleotides from the polyA sequence in Tables 16-18 or 8. These differing nucleotides may be contiguous, or alternatively, they may be non-contiguous throughout the sequence. In some embodiments, the differing nucleotides are located at the ends of the sequences. The Poly A sequence may have 70-80%, 70-90%, 70-99%, 70-100%, 80-85%, 80-90%, 80-95%, 80-99%, 80-100%, 90-95%, 90-99%, or 90-100% identity to the polyA sequence in Tables 16-18 or 8.

[1468] In some embodiments, the AAV particle comprises a 3′ITR sequence which comprises at least 15 (e.g., at least 16, 17, 18, 19, 20, 21, 22, or 23) contiguous nucleotides differing by no more than 3, 2 or 1 nucleotides from the 3′ ITR sequence in Tables 16-18. These differing nucleotides may be contiguous, or alternatively, they may be non-contiguous throughout the sequence. In some embodiments, the differing nucleotides are located at the ends of the sequences. The 3′ITR sequence may have 70-80%, 70-90%, 70-99%, 70-100%, 80-85%, 80-90%, 80-95%, 80-99%, 80-100%, 90-95%, 90-99%, or 90-100% identity to the 3′ITR in Tables 16-18.

[1469] AAV particles may be modified to enhance the efficiency of delivery. Such modified AAV particles comprising the nucleic acid sequence encoding the siRNA molecules of the present disclosure can be packaged efficiently and can be used to successfully infect the target cells at high frequency and with minimal toxicity.

[1470] In some embodiments, the AAV particle comprising a nucleic acid sequence encoding the siRNA molecules of the present disclosure may be a human serotype AAV particle. Such human AAV particle may be derived from any known serotype, e.g., from any one of serotypes AAV1-AAV11. As non-limiting examples, AAV particles may be vectors comprising an AAV1-derived genome in an AAV1-derived capsid; vectors comprising an AAV2-derived genome in an AAV2-derived capsid; vectors comprising an AAV4-derived genome in an AAV4 derived capsid; vectors comprising an AAV6-derived genome in an AAV6 derived capsid or vectors comprising an AAV9-derived genome in an AAV9 derived capsid.

[1471] In other embodiments, the AAV particle comprising a nucleic acid sequence for encoding siRNA molecules of the present disclosure may be a pseudotyped hybrid or chimeric AAV particle which contains sequences and/or components originating from at least two different AAV serotypes. Pseudotyped AAV particles may be vectors comprising an AAV genome derived from one AAV serotype and a capsid protein derived at least in part from a different AAV serotype. As non-limiting examples, such pseudotyped AAV particles may be vectors comprising an AAV2-derived genome in an AAV1-derived capsid; or vectors comprising an AAV2-derived genome in an AAV6-derived capsid; or vectors comprising an AAV2-derived genome in an AAV4-derived capsid; or an AAV2-derived genome in an AAV9-derived capsid. In like fashion, the present disclosure contemplates any hybrid or chimeric AAV particle.

[1472] In other embodiments, AAV particles comprising a nucleic acid sequence encoding the siRNA molecules of the present disclosure may be used to deliver siRNA molecules to the central nervous system (e.g., U.S. Pat. No. 6,180,613; the contents of which is herein incorporated by reference in its entirety).

[1473] In some aspects, the AAV particles comprising a nucleic acid sequence encoding the siRNA molecules of the present disclosure may further comprise a modified capsid including peptides from non-viral origin. In other aspects, the AAV particle may contain a CNS specific chimeric capsid to facilitate the delivery of encoded siRNA duplexes into the brain and the spinal cord. For example, an alignment of cap nucleotide sequences from AAV variants exhibiting CNS tropism may be constructed to identify variable region (VR) sequence and structure.

[1474] In other embodiments, the siRNA molecules of the present disclosure can be encoded in plasmid vectors, viral vectors (e.g., AAV vectors), genome or other nucleic acid expression vectors for delivery to a cell.

[1475] DNA expression plasmids can be used to stably express the siRNA duplexes or dsRNA of the present disclosure in cells and achieve long-term inhibition of target gene.

[1476] In one aspect, the sense and antisense strands of a siRNA duplex encoded by a SOD1 targeting polynucleotide are typically linked by a short spacer sequence leading to the expression of a stem-loop structure termed short hairpin RNA (shRNA). The hairpin is recognized and cleaved by Dicer, thus generating mature siRNA molecules.

[1477] According to the present disclosure, AAV particles comprising the nucleic acids of the siRNA molecules targeting SOD1 mRNA can further comprise, a capsid protein chosen from VOY101, AAVPHP.B (PHP.B), AAVPHP.N (PHP.N), AAV1, AAV2, AAV5, AAV9, AAV9 K449R, AAVrh10, and variants thereof.

[1478] In some embodiments, the siRNA duplexes or dsRNA of the present disclosure when expressed suppress (or degrade) target mRNA (i.e. SOD1). Accordingly, the siRNA duplexes or dsRNA encoded by a SOD1 targeting polynucleotide can be used to substantially inhibit SOD1 gene expression in a cell, for example a motor neuron. In some aspects, the inhibition of SOD1 gene expression refers to an inhibition by at least about 20%, preferably by at least about 30%, 40%, 50%, 60%, 70%, 80%, 85%, 90%, 95% and 100%. Accordingly, the protein product of the targeted gene may be inhibited by at least about 20%, preferably by at least about 30%, 40%, 50%, 60%, 70%, 80%, 85%, 90%, 95% and 100%. The SOD1 gene can be either a wild type gene or a mutated SOD1 gene with at least one mutation. Accordingly, the protein is either wild type protein or a mutated polypeptide with at least one mutation.

### III. Viral Production

### General Viral Production Process

[1479] Cells for the production of AAV, e.g., rAAV, particles may comprise, in some embodiments, mammalian cells (such as HEK293 cells) and/or insect cells (such as Sf9 cells).

[1480] In various embodiments, AAV production includes processes and methods for producing AAV particles and vectors which can contact a target cell to deliver a payload, e.g. a recombinant viral construct, which includes a nucleotide encoding a payload molecule. In certain embodiments, the viral vectors are adeno-associated viral (AAV) vectors such as recombinant adeno-associated viral (rAAV) vectors. In certain embodiments, the AAV particles are adeno-associated viral (AAV) particles such as recombinant adeno-associated viral (rAAV) particles.

[1481] In some embodiments, disclosed herein is a vector comprising a viral genome of the present disclosure. In some embodiments, disclosed herein is a cell comprising a viral genome of the present disclosure. In some embodiments, the cell is a bacterial cell, a mammalian cell (e.g., a HEK293 cell), or an insect cell (e.g., an Sf9 cell).

[1482] In some embodiments, disclosed herein is a method of making a viral genome. The method comprising providing a nucleic acid encoding a viral genome described herein and a backbone region suitable for replication of the viral genome in a cell, e.g., a bacterial cell (e.g., wherein the backbone region comprises one or both of a bacterial origin of replication and a selectable marker), and excising the viral genome from the backbone region, e.g., by cleaving the nucleic acid molecule at upstream and downstream of the viral genome. In some embodiments, the viral genome comprising a promoter operably linked to nucleic acid comprising a transgene encoding a polynucleotide (e.g., a SOD1 targeting siRNA described herein), will be incorporated into an AAV particle produced in the cell. In some embodiments, the cell is a bacterial cell, a mammalian cell (e.g., a HEK293 cell), or an insect cell (e.g., an Sf9 cell).

[1483] In some embodiments, disclosed herein is a method of making a recombinant AAV particle of the present disclosure, the method comprising (i) providing a host cell comprising a viral genome described herein and incubating the host cell under conditions suitable to enclose the viral genome in a capsid protein, e.g., a capsid protein described herein (e.g., a capsid protein listed in Table 2, e.g., a VOY101 capsid protein or functional variant thereof), thereby making the recombinant AAV particle. In some embodiments, the method comprises prior to step (i), introducing a first nucleic acid comprising the viral genome into a cell. In some embodiments, the host cell comprises a second nucleic acid encoding the capsid protein. In some embodiments, the second nucleic acid is introduced into the host cell prior to, concurrently with, or after the first nucleic acid molecule. In some embodiments, the host cell is a bacterial cell, a mammalian cell (e.g., a HEK293 cell), or an insect cell (e.g., an Sf9 cell).

[1484] In various embodiments, methods are provided herein of producing AAV particles or vectors by (a) contacting a viral production cell with one or more viral expression constructs encoding at least one AAV capsid protein, and one or more payload constructs encoding a payload molecule, which can be selected from: a transgene, a polynucleotide encoding protein, and a modulatory nucleic acid; (b) culturing the viral production cell under conditions such that at least one AAV particle or vector is produced, and (c) isolating the AAV particle or vector from the production stream.

[1485] In these methods, a viral expression construct may encode at least one structural protein and/or at least one non-structural protein. The structural protein may include any of the native or wild type capsid proteins VP1, VP2, and/or VP3, or a chimeric protein thereof. The non-structural protein may include any of the native or wild type Rep78, Rep68, Rep52, and/or Rep40 proteins or a chimeric protein thereof.

[1486] In certain embodiments, contacting occurs via transient transfection, viral transduction, and/or electroporation.

[1487] In certain embodiments, the viral production cell is selected from a mammalian cell and an insect cell. In certain embodiments, the insect cell includes a Spodoptera frugiperda insect cell. In certain embodiments, the insect cell includes a Sf9 insect cell. In certain embodiments, the insect cell includes a Sf21 insect cell.

[1488] The payload construct vector of the present disclosure may include, in various embodiments, at least one inverted terminal repeat (ITR) and may include mammalian DNA.

[1489] Also provided are AAV particles and viral vectors produced according to the methods described herein.

[1490] In various embodiments, the AAV particles of the present disclosure may be formulated as a pharmaceutical composition with one or more acceptable excipients.

[1491] In certain embodiments, an AAV particle or viral vector may be produced by a method described herein.

[1492] In certain embodiments, the AAV particles may be produced by contacting a viral production cell (e.g., an insect cell or a mammalian cell) with at least one viral expression construct encoding at least one capsid protein and at least one payload construct vector. The viral production cell may be contacted by transient transfection, viral transduction, and/or electroporation. The payload construct vector may include a payload construct encoding a payload molecule such as, but not limited to, a transgene, a polynucleotide encoding protein, and a modulatory nucleic acid. The viral production cell can be cultured under conditions such that at least one AAV particle or vector is produced, isolated (e.g., using temperature-induced lysis, mechanical lysis and/or chemical lysis) and/or purified (e.g., using filtration, chromatography, and/or immunoaffinity purification). As a non-limiting example, the payload construct vector may include mammalian DNA.

[1493] In certain embodiments, the AAV particles are produced in an insect cell (e.g., Spodoptera frugiperda (Sf9) cell) using a method described herein. As a non-limiting example, the insect cell is contacted using viral transduction which may include baculoviral transduction.

[1494] In certain embodiments, the AAV particles are produced in a mammalian cell (e.g., HEK293 cell) using a method described herein. As a non-limiting example, the mammalian cell is contacted using viral transduction which may include multiplasmid transient transfection (such as triple plasmid transient transfection).

[1495] In certain embodiments, the AAV particle production method described herein produces greater than 10¹, greater than 10², greater than 10³, greater than 10⁴, or greater than 10⁵ AAV particles in a viral production cell.

[1496] In certain embodiments, a process of the present disclosure includes production of viral particles in a viral production cell using a viral production system which includes at least one viral expression construct and at least one payload construct. The at least one viral expression construct and at least one payload construct can be co-transfected (e.g. dual transfection, triple transfection) into a viral production cell. The transfection is completed using standard molecular biology techniques known and routinely performed by a person skilled in the art. The viral production cell provides the cellular machinery necessary for expression of the proteins and other biomaterials necessary for producing the AAV particles, including Rep proteins which replicate the payload construct and Cap proteins which assemble to form a capsid that encloses the replicated payload constructs. The resulting AAV particle is extracted from the viral production cells and processed into a pharmaceutical preparation for administration.

[1497] In various embodiments, once administered, an AAV particle disclosed herein may, without being bound by theory, contact a target cell and enter the cell, e.g., in an endosome. The AAV particles, e.g., those released from the endosome, may subsequently contact the nucleus of the target cell to deliver the payload construct. The payload construct, e.g. recombinant viral construct, may be delivered to the nucleus of the target cell wherein the payload molecule encoded by the payload construct may be expressed.

[1498] In certain embodiments, the process for production of viral particles utilizes seed cultures of viral production cells that include one or more baculoviruses (e.g., a Baculoviral Expression Vector (BEV) or a baculovirus infected insect cell (BIIC) that has been transfected with a viral expression construct and a payload construct vector). In certain embodiments, the seed cultures are harvested, divided into aliquots and frozen, and may be used at a later time point to initiate an infection of a naïve population of production cells.

[1499] In some embodiments, large scale production of AAV particles utilizes a bioreactor. Without being bound by theory, the use of a bioreactor may allow for the precise measurement and/or control of variables that support the growth and activity of viral production cells such as mass, temperature, mixing conditions (impellor RPM or wave oscillation), CO₂ concentration, O₂ concentration, gas sparge rates and volumes, gas overlay rates and volumes, pH, Viable Cell Density (VCD), cell viability, cell diameter, and/or optical density (OD). In certain embodiments, the bioreactor is used for batch production in which the entire culture is harvested at an experimentally determined time point and AAV particles are purified. In some embodiments, the bioreactor is used for continuous production in which a portion of the culture is harvested at an experimentally determined time point for purification of AAV particles, and the remaining culture in the bioreactor is refreshed with additional growth media components.

[1500] In various embodiments, AAV viral particles can be extracted from viral production cells in a process which includes cell lysis, clarification, sterilization and purification. Cell lysis includes any process that disrupts the structure of the viral production cell, thereby releasing AAV particles. In certain embodiments, cell lysis may include thermal shock, chemical, or mechanical lysis methods. Clarification can include the gross purification of the mixture of lysed cells, media components, and AAV particles. In certain embodiments, clarification includes centrifugation and/or filtration, including but not limited to depth end, tangential flow, and/or hollow fiber filtration.

[1501] In various embodiments, the end result of viral production is a purified collection of AAV particles which include two components: (1) a payload construct (e.g. a recombinant AAV viral genome construct) and (2) a viral capsid.

[1502] In certain embodiments, a viral production system or process of the present disclosure includes steps for producing baculovirus infected insect cells (BIICs) using Viral Production Cells (VPC) and plasmid constructs. Viral Production Cells (VPCs) from a Cell Bank (CB) are thawed and expanded to provide a target working volume and VPC concentration. The resulting pool of VPCs is split into a Rep/Cap VPC pool and a Payload VPC pool. One or more Rep/Cap plasmid constructs (viral expression constructs) are processed into Rep/Cap Bacmid polynucleotides and transfected into the Rep/Cap VPC pool. One or more Payload plasmid constructs (payload constructs) are processed into Payload Bacmid polynucleotides and transfected into the Payload VPC pool. The two VPC pools are incubated to produce P1 Rep/Cap Baculoviral Expression Vectors (BEVs) and P1 Payload BEVs. The two BEV pools are expanded into a collection of Plaques, with a single Plaque being selected for Clonal Plaque (CP) Purification (also referred to as Single Plaque Expansion). The process can include a single CP Purification step or can include multiple CP Purification steps either in series or separated by other processing steps. The one-or-more CP Purification steps provide a CP Rep/Cap BEV pool and a CP Payload BEV pool. These two BEV pools can then be stored and used for future production steps, or they can be then transfected into VPCs to produce a Rep/Cap BIIC pool and a Payload BIIC pool.

[1503] In certain embodiments, a viral production system or process of the present disclosure includes steps for producing AAV particles using Viral Production Cells (VPC) and baculovirus infected insect cells (BIICs). Viral Production Cells (VPCs) from a Cell Bank (CB) are thawed and expanded to provide a target working volume and VPC concentration. The working volume of Viral Production Cells is seeded into a Production Bioreactor and can be further expanded to a working volume of 200-2000 L with a target VPC concentration for BIIC infection. The working volume of VPCs in the Production Bioreactor is then co-infected with Rep/Cap BIICs and Payload BIICs, with a target VPC:BIIC ratio and a target BIIC:BIIC ratio. VCD infection can also utilize BEVs. The co-infected VPCs are incubated and expanded in the Production Bioreactor to produce a bulk harvest of AAV particles and VPCs.

### Viral Expression Constructs

[1504] In various embodiments, the viral production system of the present disclosure includes one or more viral expression constructs that can be transfected/transduced into a viral production cell. In certain embodiments, a viral expression construct or a payload construct of the present disclosure can be a bacmid, also known as a baculovirus plasmid or recombinant baculovirus genome. In certain embodiments, the viral expression includes a protein-coding nucleotide sequence and at least one expression control sequence for expression in a viral production cell. In certain embodiments, the viral expression includes a protein-coding nucleotide sequence operably linked to least one expression control sequence for expression in a viral production cell. In certain embodiments, the viral expression construct contains parvoviral genes under control of one or more promoters. Parvoviral genes can include nucleotide sequences encoding non-structural AAV replication proteins, such as Rep genes which encode Rep52, Rep40, Rep68, or Rep78 proteins. Parvoviral genes can include nucleotide sequences encoding structural AAV proteins, such as Cap genes which encode VP1, VP2, and VP3 proteins.

[1505] Viral expression constructs of the present disclosure may include any compound or formulation, biological or chemical, which facilitates transformation, transfection, or transduction of a cell with a nucleic acid. Exemplary biological viral expression constructs include plasmids, linear nucleic acid molecules, and recombinant viruses including baculovirus. Exemplary chemical vectors include lipid complexes. Viral expression constructs are used to incorporate nucleic acid sequences into virus replication cells in accordance with the present disclosure. (O'Reilly, David R., Lois K. Miller, and Verne A. Luckow. Baculovirus expression vectors: a laboratory manual. Oxford University Press, 1994.); Maniatis et al., eds. Molecular Cloning. CSH Laboratory, NY, N.Y. (1982); and, Philiport and Scluber, eds. Liposomes as tools in Basic Research and Industry. CRC Press, Ann Arbor, Mich. (1995), the contents of each of which are herein incorporated by reference in their entirety as related to viral expression constructs and uses thereof.

[1506] In certain embodiments, the viral expression construct is an AAV expression construct which includes one or more nucleotide sequences encoding non-structural AAV replication proteins, structural AAV capsid proteins, or a combination thereof.

[1507] In certain embodiments, the viral expression construct of the present disclosure may be a plasmid vector. In certain embodiments, the viral expression construct of the present disclosure may be a baculoviral construct.

[1508] The present disclosure is not limited by the number of viral expression constructs employed to produce AAV particles or viral vectors. In certain embodiments, one, two, three, four, five, six, or more viral expression constructs can be employed to produce AAV particles in viral production cells in accordance with the present disclosure. In certain embodiments of the present disclosure, a viral expression construct may be used for the production of an AAV particles in insect cells. In certain embodiments, modifications may be made to the wild type AAV sequences of the capsid and/or rep genes, for example to improve attributes of the viral particle, such as increased infectivity or specificity, or to enhance production yields.

[1509] In certain embodiments, the viral expression construct may contain a nucleotide sequence which includes start codon region, such as a sequence encoding AAV capsid proteins which include one or more start codon regions. In certain embodiments, the start codon region can be within an expression control sequence. The start codon can be ATG or a non-ATG codon (i.e., a suboptimal start codon where the start codon of the AAV VP1 capsid protein is a non-ATG).

[1510] In certain embodiments, the viral expression construct used for AAV production may contain a nucleotide sequence encoding the AAV capsid proteins where the initiation codon of the AAV VP1 capsid protein is a non-ATG, i.e., a suboptimal initiation codon, allowing the expression of a modified ratio of the viral capsid proteins in the production system, to provide improved infectivity of the host cell. In a non-limiting example, a viral construct vector may contain a nucleic acid construct comprising a nucleotide sequence encoding AAV VP1, VP2, and VP3 capsid proteins, wherein the initiation codon for translation of the AAV VP1 capsid protein is CTG, TTG, or GTG, as described in U.S. Pat. No. 8,163,543, the contents of which are herein incorporated by reference in their entirety as related to AAV capsid proteins and the production thereof.

[1511] In certain embodiments, the viral expression construct of the present disclosure may be a plasmid vector or a baculoviral construct that encodes the parvoviral rep proteins for expression in insect cells. In certain embodiments, a single coding sequence is used for the Rep78 and Rep52 proteins, wherein start codon for translation of the Rep78 protein is a suboptimal start codon, selected from the group consisting of ACG, TTG, CTG, and GTG, that effects partial exon skipping upon expression in insect cells, as described in U.S. Pat. No. 8,512,981, the contents of which are herein incorporated by reference in their entirety, for example to promote less abundant expression of Rep78 as compared to Rep52, which may promote high vector yields.

[1512] In certain embodiments, a VP-coding region encodes one or more AAV capsid proteins of a specific AAV serotype. The AAV serotypes for VP-coding regions can be the same or different. In certain embodiments, a VP-coding region can be codon optimized. In certain embodiments, a VP-coding region or nucleotide sequence can be codon optimized for a mammal cell. In certain embodiments, a VP-coding region or nucleotide sequence can be codon optimized for an insect cell. In certain embodiments, a VP-coding region or nucleotide sequence can be codon optimized for a Spodoptera frugiperda cell. In certain embodiments, a VP-coding region or nucleotide sequence can be codon optimized for Sf9 or Sf21 cell lines.

[1513] In certain embodiments, a nucleotide sequence encoding one or more VP capsid proteins can be codon optimized to have a nucleotide homology with the reference nucleotide sequence of less than 100%. In certain embodiments, the nucleotide homology between the codon-optimized VP nucleotide sequence and the reference VP nucleotide sequence is less than 100%, less than 99%, less than 98%, less than 97%, less than 96%, less than 95%, less than 94%, less than 93%, less than 92%, less than 91%, less than 90%, less than 89%, less than 88%, less than 87%, less than 86%, less than 85%, less than 84%, less than 83%, less than 82%, less than 81%, less than 80%, less than 78%, less than 76%, less than 74%, less than 72%, less than 70%, less than 68%, less than 66%, less than 64%, less than 62%, less than 60%, less than 55%, less than 50%, and less than 40%.

[1514] In certain embodiments, a viral expression construct or a payload construct of the present disclosure can be a bacmid, also known as a baculovirus plasmid or recombinant baculovirus genome. In certain embodiments, a viral expression construct or a payload construct of the present disclosure (e.g. bacmid) can include a polynucleotide incorporated by homologous recombination (transposon donor/acceptor system) into the bacmid by standard molecular biology techniques known and performed by a person skilled in the art.

[1515] In certain embodiments, the polynucleotide incorporated into the bacmid (i.e. polynucleotide insert) can include an expression control sequence operably linked to a protein-coding nucleotide sequence. In certain embodiments, the polynucleotide incorporated into the bacmid can include an expression control sequence which includes a promoter, such as p10 or polh, and which is operably linked to a nucleotide sequence which encodes a structural AAV capsid protein (e.g. VP1, VP2, VP3 or a combination thereof). In certain embodiments, the polynucleotide incorporated into the bacmid can include an expression control sequence which includes a promoter, such as p10 or polh, and which is operably linked to a nucleotide sequence which encodes a non-structural AAV capsid protein (e.g. Rep78, Rep52, or a combination thereof).

[1516] The method of the present disclosure is not limited by the use of specific expression control sequences. However, when a certain stoichiometry of VP products are achieved (close to 1:1:10 for VP1, VP2, and VP3, respectively) and also when the levels of Rep52 or Rep40 (also referred to as the p19 Reps) are significantly higher than Rep78 or Rep68 (also referred to as the p5 Reps), improved yields of AAV in production cells (such as insect cells) may be obtained. In certain embodiments, the p5/p19 ratio is below 0.6 more, below 0.4, or below 0.3, but always at least 0.03. These ratios can be measured at the level of the protein or can be implicated from the relative levels of specific mRNAs.

[1517] In certain embodiments, AAV particles are produced in viral production cells (such as mammalian or insect cells) wherein all three VP proteins are expressed at a stoichiometry approaching, about or which is: 1:1:10 (VP1:VP2:VP3); 2:2:10 (VP1:VP2:VP3); 2:0:10 (VP1:VP2:VP3); 1-2:0-2:10 (VP1:VP2:VP3); 1-2:1-2:10 (VP1:VP2:VP3); 2-3:0-3:10 (VP1:VP2:VP3); 2-3:2-3:10 (VP1:VP2:VP3); 3:3:10 (VP1:VP2:VP3); 3-5:0-5:10 (VP1:VP2:VP3); or 3-5:3-5:10 (VP1:VP2:VP3).

[1518] In certain embodiments, the expression control regions are engineered to produce a VP1:VP2:VP3 ratio selected from the group consisting of: about or exactly 1:0:10; about or exactly 1:1:10; about or exactly 2:1:10; about or exactly 2:1:10; about or exactly 2:2:10; about or exactly 3:0:10; about or exactly 3:1:10; about or exactly 3:2:10; about or exactly 3:3:10; about or exactly 4:0:10; about or exactly 4:1:10; about or exactly 4:2:10; about or exactly 4:3:10; about or exactly 4:4:10; about or exactly 5:5:10; about or exactly 1-2:0-2:10; about or exactly 1-2:1-2:10; about or exactly 1-3:0-3:10; about or exactly 1-3:1-3:10; about or exactly 1-4:0-4:10; about or exactly 1-4:1-4:10; about or exactly 1-5:1-5:10; about or exactly 2-3:0-3:10; about or exactly 2-3:2-3:10; about or exactly 2-4:2-4:10; about or exactly 2-5:2-5:10; about or exactly 3-4:3-4:10; about or exactly 3-5:3-5:10; and about or exactly 4-5:4-5:10.

[1519] In certain embodiments of the present disclosure, Rep52 or Rep78 is transcribed from the baculoviral derived polyhedron promoter (polh). Rep52 or Rep78 can also be transcribed from a weaker promoter, for example a deletion mutant of the ie-1 promoter, the Δie-1 promoter, has about 20% of the transcriptional activity of that ie-1 promoter. A promoter substantially homologous to the Δie-1 promoter may be used. In respect to promoters, a homology of at least 50%, 60%, 70%, 80%, 90% or more, is considered to be a substantially homologous promoter.

### Mammalian Cells

[1520] Viral production of the present disclosure disclosed herein describes processes and methods for producing AAV particles or viral vector that contacts a target cell to deliver a payload construct, e.g. a recombinant AAV particle or viral construct, which includes a nucleotide encoding a payload molecule. The viral production cell may be selected from any biological organism, including prokaryotic (e.g., bacterial) cells, and eukaryotic cells, including, insect cells, yeast cells and mammalian cells.

[1521] In certain embodiments, the AAV particles of the present disclosure may be produced in a viral production cell that includes a mammalian cell. Viral production cells may comprise mammalian cells such as A549, WEH1, 3T3, 10T1/2, BHK, MDCK, COS 1, COS 7, BSC 1, BSC 40, BMT 10, VERO, W138, HeLa, HEK293, HEK293T (293T), Saos, C2C12, L cells, HT1080, Huh7, HepG2, C127, 3T3, CHO, HeLa cells, KB cells, BHK and primary fibroblast, hepatocyte, and myoblast cells derived from mammals. Viral production cells can include cells derived from any mammalian species including, but not limited to, human, monkey, mouse, rat, rabbit, and hamster or cell type, including but not limited to fibroblast, hepatocyte, tumor cell, cell line transformed cell, etc.

[1522] AAV viral production cells commonly used for production of recombinant AAV particles include, but is not limited to other mammalian cell lines as described in U.S. Pat. Nos. 6,156,303, 5,387,484, 5,741,683, 5,691,176, 6,428,988 and 5,688,676; U.S. patent application 2002/0081721, and International Patent Publication Nos. WO 00/47757, WO 00/24916, and WO 96/17947, the contents of each of which are herein incorporated by reference in their entireties insofar as they do no conflict with the present disclosure. In certain embodiments, the AAV viral production cells are trans-complementing packaging cell lines that provide functions deleted from a replication-defective helper virus, e.g., HEK293 cells or other Ea trans-complementing cells.

[1523] In certain embodiments, the packaging cell line 293-10-3 (ATCC Accession No. PTA-2361) may be used to produce the AAV particles, as described in U.S. Pat. No. 6,281,010, the contents of which are herein incorporated by reference in their entirety as related to the 293-10-3 packaging cell line and uses thereof.

[1524] In certain embodiments, of the present disclosure a cell line, such as a HeLA cell line, for trans-complementing E1 deleted adenoviral vectors, which encoding adenovirus E1a and adenovirus E1b under the control of a phosphoglycerate kinase (PGK) promoter can be used for AAV particle production as described in U.S. Pat. No. 6,365,394, the contents of which are incorporated herein by reference in their entirety as related to the HeLa cell line and uses thereof.

[1525] In certain embodiments, AAV particles are produced in mammalian cells using a multiplasmid transient transfection method (such as triple plasmid transient transfection). In certain embodiments, the multiplasmid transient transfection method includes transfection of the following three different constructs: (i) a payload construct, (ii) a Rep/Cap construct (parvoviral Rep and parvoviral Cap), and (iii) a helper construct. In certain embodiments, the triple transfection method of the three components of AAV particle production may be utilized to produce small lots of virus for assays including transduction efficiency, target tissue (tropism) evaluation, and stability. In certain embodiments, the triple transfection method of the three components of AAV particle production may be utilized to produce large lots of materials for clinical or commercial applications.

[1526] AAV particles to be formulated may be produced by triple transfection or baculovirus mediated virus production, or any other method known in the art. Any suitable permissive or packaging cell known in the art may be employed to produce the vectors. In certain embodiments, trans-complementing packaging cell lines are used that provide functions deleted from a replication-defective helper virus, e.g., 293 cells or other E1a trans-complementing cells.

[1527] The gene cassette may contain some or all of the parvovirus (e.g., AAV) cap and rep genes. In certain embodiments, some or all of the cap and rep functions are provided in trans by introducing a packaging vector(s) encoding the capsid and/or Rep proteins into the cell. In certain embodiments, the gene cassette does not encode the capsid or Rep proteins. Alternatively, a packaging cell line is used that is stably transformed to express the cap and/or rep genes.

[1528] Recombinant AAV virus particles are, in certain embodiments, produced and purified from culture supernatants according to the procedure as described in US2016/0032254, the contents of which are incorporated by reference in their entirety as related to the production and processing of recombinant AAV virus particles. Production may also involve methods known in the art including those using 293T cells, triple transfection or any suitable production method.

[1529] In certain embodiments, mammalian viral production cells (e.g. 293T cells) can be in an adhesion/adherent state (e.g. with calcium phosphate) or a suspension state (e.g. with polyethyleneimine (PEI)). The mammalian viral production cell is transfected with plasmids required for production of AAV, (i.e., AAV rep/cap construct, an adenoviral helper construct, and/or ITR flanked payload construct). In certain embodiments, the transfection process can include optional medium changes (e.g. medium changes for cells in adhesion form, no medium changes for cells in suspension form, medium changes for cells in suspension form if desired). In certain embodiments, the transfection process can include transfection mediums such as DMEM or F17. In certain embodiments, the transfection medium can include serum or can be serum-free (e.g. cells in adhesion state with calcium phosphate and with serum, cells in suspension state with PEI and without serum).

[1530] Cells can subsequently be collected by scraping (adherent form) and/or pelleting (suspension form and scraped adherent form) and transferred into a receptacle. Collection steps can be repeated as necessary for full collection of produced cells. Next, cell lysis can be achieved by consecutive freeze-thaw cycles (−80 C to 37 C), chemical lysis (such as adding detergent triton), mechanical lysis, or by allowing the cell culture to degrade after reaching ˜0% viability. Cellular debris is removed by centrifugation and/or depth filtration. The samples are quantified for AAV particles by DNase resistant genome titration by DNA qPCR.

[1531] AAV particle titers are measured according to genome copy number (genome particles per milliliter). Genome particle concentrations are based on DNA qPCR of the vector DNA as previously reported (Clark et al. (1999) Hum. Gene Ther., 10:1031-1039; Veldwijk et al. (2002) Mol. Ther., 6:272-278, the contents of which are each incorporated by reference in their entireties as related to the measurement of particle concentrations).

### Insect Cells

[1532] Viral production of the present disclosure includes processes and methods for producing AAV particles or viral vectors that contact a target cell to deliver a payload construct, e.g., a recombinant viral construct, which includes a nucleotide encoding a payload molecule. In certain embodiments, the AAV particles or viral vectors of the present disclosure may be produced in a viral production cell that includes an insect cell.

[1533] Growing conditions for insect cells in culture, and production of heterologous products in insect cells in culture are well-known in the art, see U.S. Pat. No. 6,204,059, the contents of which are herein incorporated by reference in their entirety as related to the growth and use of insect cells in viral production.

[1534] Any insect cell which allows for replication of parvovirus and which can be maintained in culture can be used in accordance with the present disclosure. AAV viral production cells commonly used for production of recombinant AAV particles include, but is not limited to, Spodoptera frugiperda, including, but not limited to the Sf9 or Sf21 cell lines, Drosophila cell lines, or mosquito cell lines, such as Aedes albopictus derived cell lines. Use of insect cells for expression of heterologous proteins is well documented, as are methods of introducing nucleic acids, such as vectors, e.g., insect-cell compatible vectors, into such cells and methods of maintaining such cells in culture. See, for example, Methods in Molecular Biology, ed. Richard, Humana Press, NJ (1995); O'Reilly et al., Baculovirus Expression Vectors, A Laboratory Manual, Oxford Univ. Press (1994); Samulski et al., J. Vir. 63:3822-8 (1989); Kajigaya et al., Proc. Nat'l. Acad. Sci. USA 88: 4646-50 (1991); Ruffing et al., J. Vir. 66:6922-30 (1992); Kimbauer et al., Vir. 219:37-44 (1996); Zhao et al., Vir. 272:382-93 (2000); and Samulski et al., U.S. Pat. No. 6,204,059, the contents of each of which are herein incorporated by reference in their entirety as related to the use of insect cells in viral production.

[1535] In some embodiments, the AAV particles are made using the methods described in WO2015/191508, the contents of which are herein incorporated by reference in their entirety insofar as they do not conflict with the present disclosure.

[1536] In certain embodiments, insect host cell systems, in combination with baculoviral systems (e.g., as described by Luckow et al., Bio/Technology 6: 47 (1988)) may be used. In certain embodiments, an expression system for preparing chimeric peptide is Trichoplusia ni, Tn 5B1-4 insect cells/baculoviral system, which can be used for high levels of proteins, as described in U.S. Pat. No. 6,660,521, the contents of which are herein incorporated by reference in their entirety as related to the production of viral particles.

[1537] Expansion, culturing, transfection, infection and storage of insect cells can be carried out in any cell culture media, cell transfection media or storage media known in the art, including Hyclone™ SFX-Insect™ Cell Culture Media, Expression System ESF AF™ Insect Cell Culture Medium, ThermoFisher Sf-900II™ media, ThermoFisher Sf-900II™ media, or ThermoFisher Grace's Insect Media. Insect cell mixtures of the present disclosure can also include any of the formulation additives or elements described in the present disclosure, including (but not limited to) salts, acids, bases, buffers, surfactants (such as Poloxamer 188/Pluronic F-68), and other known culture media elements. Formulation additives can be incorporated gradually or as “spikes” (incorporation of large volumes in a short time).

### Baculovirus-Production Systems

[1538] In certain embodiments, processes of the present disclosure can include production of AAV particles or viral vectors in a baculoviral system using a viral expression construct and a payload construct vector. In certain embodiments, the baculoviral system includes Baculovirus expression vectors (BEVs) and/or baculovirus infected insect cells (BIICs). In certain embodiments, a viral expression construct or a payload construct of the present disclosure can be a bacmid, also known as a baculovirus plasmid or recombinant baculovirus genome. In certain embodiments, a viral expression construct or a payload construct of the present disclosure can be polynucleotide incorporated by homologous recombination (transposon donor/acceptor system) into a bacmid by standard molecular biology techniques known and performed by a person skilled in the art. Transfection of separate viral replication cell populations produces two or more groups (e.g. two, three) of baculoviruses (BEVs), one or more group which can include the viral expression construct (Expression BEV), and one or more group which can include the payload construct (Payload BEV). The baculoviruses may be used to infect a viral production cell for production of AAV particles or viral vector.

[1539] In certain embodiments, the process includes transfection of a single viral replication cell population to produce a single baculovirus (BEV) group which includes both the viral expression construct and the payload construct. These baculoviruses may be used to infect a viral production cell for production of AAV particles or viral vector.

[1540] In certain embodiments, BEVs are produced using a Bacmid Transfection agent, such as Promega FuGENE® HD, WFI water, or ThermoFisher Cellfectin® II Reagent. In certain embodiments, BEVs are produced and expanded in viral production cells, such as an insect cell.

[1541] In certain embodiments, the method utilizes seed cultures of viral production cells that include one or more BEVs, including baculovirus infected insect cells (BIICs). The seed BIICs have been transfected/transduced/infected with an Expression BEV which includes a viral expression construct, and also a Payload BEV which includes a payload construct. In certain embodiments, the seed cultures are harvested, divided into aliquots and frozen, and may be used at a later time to initiate transfection/transduction/infection of a naïve population of production cells. In certain embodiments, a bank of seed BIICs is stored at −80° C. or in LN2 vapor.

[1542] Baculoviruses are made of several essential proteins which are essential for the function and replication of the Baculovirus, such as replication proteins, envelope proteins and capsid proteins. The Baculovirus genome thus includes several essential-gene nucleotide sequences encoding the essential proteins. As a non-limiting example, the genome can include an essential-gene region which includes an essential-gene nucleotide sequence encoding an essential protein for the Baculovirus construct. The essential protein can include: GP64 baculovirus envelope protein, VP39 baculovirus capsid protein, or other similar essential proteins for the Baculovirus construct.

[1543] Baculovirus expression vectors (BEV) for producing AAV particles in insect cells, including but not limited to Spodoptera frugiperda (Sf9) cells, provide high titers of viral vector product. Recombinant baculovirus encoding the viral expression construct and payload construct initiates a productive infection of viral vector replicating cells. Infectious baculovirus particles released from the primary infection secondarily infect additional cells in the culture, exponentially infecting the entire cell culture population in a number of infection cycles that is a function of the initial multiplicity of infection, see Urabe, M. et al. J Virol. 2006 February; 80(4):1874-85, the contents of which are herein incorporated by reference in their entirety as related to the production and use of BEVs and viral particles.

[1544] Production of AAV particles with baculovirus in an insect cell system may address known baculovirus genetic and physical instability.

[1545] In certain embodiments, the production system of the present disclosure addresses baculovirus instability over multiple passages by utilizing a titerless infected-cells preservation and scale-up system. Small scale seed cultures of viral producing cells are transfected with viral expression constructs encoding the structural and/or non-structural components of the AAV particles. Baculovirus-infected viral producing cells are harvested into aliquots that may be cryopreserved in liquid nitrogen; the aliquots retain viability and infectivity for infection of large scale viral producing cell culture. Wasilko D J et al. Protein Expr Purif. 2009 June; 65(2):122-32, the contents of which are herein incorporated by reference in their entirety as related to the production and use of BEVs and viral particles.

[1546] A genetically stable baculovirus may be used to produce a source of the one or more of the components for producing AAV particles in invertebrate cells. In certain embodiments, defective baculovirus expression vectors may be maintained episomally in insect cells. In such embodiments, the corresponding bacmid vector is engineered with replication control elements, including but not limited to promoters, enhancers, and/or cell-cycle regulated replication elements.

[1547] In certain embodiments, stable viral producing cells permissive for baculovirus infection are engineered with at least one stable integrated copy of any of the elements necessary for AAV replication and vector production including, but not limited to, the entire AAV genome, Rep and Cap genes, Rep genes, Cap genes, each Rep protein as a separate transcription cassette, each VP protein as a separate transcription cassette, the AAP (assembly activation protein), or at least one of the baculovirus helper genes with native or non-native promoters.

[1548] In some embodiments, the AAV particle of the present disclosure may be produced in insect cells (e.g., Sf9 cells).

[1549] In some embodiments, the AAV particle of the present disclosure may be produced using triple transfection.

[1550] In some embodiments, the AAV particle of the present disclosure may be produced in mammalian cells.

[1551] In some embodiments, the AAV particle of the present disclosure may be produced by triple transfection in mammalian cells.

[1552] In some embodiments, the AAV particle of the present disclosure may be produced by triple transfection in HEK293 cells.

[1553] The AAV viral genomes encoding SOD1 targeting siRNA described herein may be useful in the fields of human disease, veterinary applications and a variety of in vivo and in vitro settings. The AAV particles of the present disclosure may be useful in the field of medicine for the treatment, prophylaxis, palliation, or amelioration of neurological or neuromuscular diseases and/or disorders. In some embodiments, the AAV particles of the disclosure are used for the prevention and/or treatment of SOD1-related disorders.

[1554] Various embodiments of the disclosure herein provide a pharmaceutical composition comprising the AAV particle described herein and a pharmaceutically acceptable excipient.

[1555] Various embodiments of the disclosure herein provide a method of treating a subject in need thereof comprising administering to the subject a therapeutically effective amount of the pharmaceutical composition described herein.

[1556] Certain embodiments of the method provide that the subject is treated by a route of administration of the pharmaceutical composition selected from the group consisting of: intravenous, intracerebroventricular, intraparenchymal, intrathecal, subpial, and intramuscular, or a combination thereof. Certain embodiments of the method provide that the subject is treated for SOD1-related disorders. In one aspect of the method, a pathological feature of the SOD1-related disorder is alleviated and/or the progression of the SOD1-related disorder is halted, slowed, ameliorated, or reversed.

[1557] Various embodiments of the disclosure herein describe a method of increasing the level of SOD1 targeting siRNAs in the central nervous system of a subject in need thereof comprising administering to said subject via infusion, an effective amount of the pharmaceutical composition described herein.

[1558] Also described herein are compositions, methods, processes, kits and devices for the design, preparation, manufacture and/or formulation of AAV particles. In some embodiments, payloads, such as but not limited to payloads comprising SOD1 targeting siRNAs, may be encoded by payload constructs or contained within plasmids or vectors or recombinant adeno-associated viruses (AAVs).

[1559] The present disclosure also provides administration and/or delivery methods for vectors and viral particles, e.g., AAV particles, for the treatment or amelioration of SOD1-related disorders. Such methods may involve gene replacement or gene activation. Such outcomes are achieved by utilizing the methods and compositions taught herein.

### IV. Introduction into Cells

[1560] To ensure the chemical and biological stability of siRNA duplexes, it is important to deliver polynucleotides encoding the siRNAs inside the target cells. The polynucleotides of the present disclosure may be introduced into cells using any of a variety of approaches.

[1561] In some embodiments, the polynucleotide of the present disclosure is introduced into a cell by contacting the cell with the polynucleotide. In some embodiments, the polynucleotide is introduced into a cell by contacting the cell with a composition comprising the polynucleotide and a lipophilic carrier. In other embodiments, the polynucleotide is introduced into a cell by transfecting or infecting the cell with a vector comprising nucleic acid sequences capable of producing the siRNA duplex when transcribed in the cell.

[1562] In some embodiments, the siRNA duplex is introduced into a cell by injecting into the cell a vector comprising nucleic acid sequences capable of producing the siRNA duplex when transcribed in the cell.

[1563] In other embodiments, the polynucleotides of the present disclosure may be delivered into cells by electroporation (e.g. U.S. Patent Publication No. 20050014264; the content of which is herein incorporated by reference in its entirety).

[1564] In addition, the siRNA molecules inserted into viral vectors (e.g. AAV vectors) may be delivered into cells by viral infection. These viral vectors are engineered and optimized to facilitate the entry of siRNA molecule into cells that are not readily amendable to transfection. Also, some synthetic viral vectors possess an ability to integrate the shRNA into the cell genome, thereby leading to stable siRNA expression and long-term knockdown of a target gene. In this manner, viral vectors are engineered as vehicles for specific delivery while lacking the deleterious replication and/or integration features found in wild-type virus.

[1565] In some embodiments, the cells may include, but are not limited to, cells of mammalian origin, cells of human origins, embryonic stem cells, induced pluripotent stem cells, neural stem cells, and neural progenitor cells.

### V. Pharmaceutical Compositions and Formulation

[1566] The present disclosure additionally provides a method for treating SOD1-related disorders and disorders related to deficiencies in the function or expression of SOD1 in a mammalian subject, including a human subject, comprising administering to the subject any of the AAV polynucleotides or AAV genomes described herein (i.e., “vector genomes,” “viral genomes,” or “VGs”) or administering to the subject a particle comprising said AAV polynucleotide or AAV genome, or administering to the subject any of the described compositions, including pharmaceutical compositions.

[1567] As used herein the term “composition” comprises an AAV polynucleotide or AAV genome or AAV particle and at least one excipient.

[1568] As used herein the term “pharmaceutical composition” comprises an AAV polynucleotide or AAV genome or AAV particle and one or more pharmaceutically acceptable excipients.

[1569] Although the descriptions of pharmaceutical compositions, e.g., AAV comprising a payload encoding a SOD1 targeting siRNA to be delivered, provided herein are principally directed to pharmaceutical compositions which are suitable for administration to humans, it will be understood by the skilled artisan that such compositions are generally suitable for administration to any other animal, e.g., to non-human animals, e.g. non-human mammals. Modification of pharmaceutical compositions suitable for administration to humans in order to render the compositions suitable for administration to various animals is well understood, and the ordinarily skilled veterinary pharmacologist can design and/or perform such modification with merely ordinary, if any, experimentation. Subjects to which administration of the pharmaceutical compositions is contemplated include, but are not limited to, humans and/or other primates; mammals, including commercially relevant mammals such as cattle, pigs, horses, sheep, cats, dogs, mice, and/or rats; and/or birds, including commercially relevant birds such as poultry, chickens, ducks, geese, and/or turkeys.

[1570] In some embodiments, compositions are administered to humans, human patients, or subjects.

[1571] In some embodiments, the AAV particle formulations described herein may contain a nucleic acid encoding at least one payload. In some embodiments, the formulations may contain a nucleic acid encoding 1, 2, 3, 4, or 5 payloads. In some embodiments, the formulation may contain a nucleic acid encoding a payload construct encoding proteins selected from categories such as, but not limited to, human proteins, veterinary proteins, bacterial proteins, biological proteins, antibodies, immunogenic proteins, therapeutic peptides and proteins, secreted proteins, plasma membrane proteins, cytoplasmic proteins, cytoskeletal proteins, intracellular membrane bound proteins, nuclear proteins, proteins associated with human disease, and/or proteins associated with non-human diseases. In some embodiments, the formulation contains at least three payload constructs encoding proteins. Certain embodiments provide that at least one of the payloads is a SOD1 targeting polynucleotide (e.g., a SOD1 targeting RNAi, e.g., a siRNA duplex for inhibiting expression of SOD1) described herein, or a variant thereof.

[1572] A pharmaceutical composition in accordance with the present disclosure may be prepared, packaged, and/or sold in bulk, as a single unit dose, and/or as a plurality of single unit doses. As used herein, a “unit dose” refers to a discrete amount of the pharmaceutical composition comprising a predetermined amount of the active ingredient. The amount of the active ingredient is generally equal to the dosage of the active ingredient which would be administered to a subject and/or a convenient fraction of such a dosage such as, for example, one-half or one-third of such a dosage.

### VI. Formulations

[1573] Formulations of the AAV pharmaceutical compositions described herein may be prepared by any method known or hereafter developed in the art of pharmacology. In general, such preparatory methods include the step of bringing the active ingredient into association with an excipient and/or one or more other accessory ingredients, and then, if necessary and/or desirable, dividing, shaping and/or packaging the product into a desired single- or multi-dose unit.

[1574] Relative amounts of the active ingredient, the pharmaceutically acceptable excipient, and/or any additional ingredients in a pharmaceutical composition in accordance with the disclosure will vary, depending upon the identity, size, and/or condition of the subject treated and further depending upon the route by which the composition is to be administered.

[1575] For example, the composition may comprise between 0.1% and 99% (w/w) of the active ingredient. By way of example, the composition may comprise between 0.1% and 100%, e.g., between 0.5% and 50%, between 1-30%, between 5-80%, or at least 80% (w/w) active ingredient.

[1576] In some embodiments, the formulations described herein may contain at least one SOD1 targeting polynucleotide (e.g., a SOD1 targeting RNAi, e.g., a siRNA duplex for inhibiting expression of SOD1). As a non-limiting example, the formulations may contain 1, 2, 3, 4 or 5 polynucleotide that target the SOD1 gene at different sites.

[1577] The AAV particles of the disclosure can be formulated using one or more excipients to: (1) increase stability; (2) increase cell transfection or transduction; (3) permit the sustained or delayed release; (4) alter the biodistribution (e.g., target the viral particle to specific tissues or cell types); (5) increase the translation of encoded protein in vivo; (6) alter the release profile of encoded protein in vivo and/or (7) allow for regulatable expression of the payload.

[1578] Formulations of the present disclosure can include, without limitation, saline, lipidoids, liposomes, lipid nanoparticles, polymers, lipoplexes, core-shell nanoparticles, peptides, proteins, cells transfected with viral vectors (e.g., for transplantation into a subject), nanoparticle mimics and combinations thereof. Further, the viral vectors of the present disclosure may be formulated using self-assembled nucleic acid nanoparticles.

[1579] In some embodiments, the viral vectors encoding the SOD1 targeting polynucleotides may be formulated to optimize baricity and/or osmolality. In some embodiments, the baricity and/or osmolality of the formulation may be optimized to ensure optimal drug distribution in the central nervous system or a region or component of the central nervous system.

[1580] In some embodiments, the AAV particles of the disclosure may be formulated in PBS with 0.001% of pluronic acid (F-68) at a pH of about 7.0.

[1581] In some embodiments, the AAV particles of the disclosure may be formulated in PBS, in combination with an ethylene oxide/propylene oxide copolymer (also known as pluronic or poloxamer).

[1582] In some embodiments, the AAV particles of the disclosure may be formulated in PBS with 0.001% pluronic acid (F-68) (poloxamer 188) at a pH of about 7.0.

[1583] In some embodiments, the AAV particles of the disclosure may be formulated in PBS with 0.001% pluronic acid (F-68) (poloxamer 188) at a pH of about 7.3.

[1584] In some embodiments, the AAV particles of the disclosure may be formulated in PBS with 0.001% pluronic acid (F-68) (poloxamer 188) at a pH of about 7.4.

[1585] In some embodiments, the AAV particles of the disclosure may be formulated in a solution comprising sodium chloride, sodium phosphate and an ethylene oxide/propylene oxide copolymer.

[1586] In some embodiments, the AAV particles of the disclosure may be formulated in a solution comprising sodium chloride, sodium phosphate dibasic, potassium chloride, potassium phosphate monobasic, and poloxamer 188/pluronic acid (F-68).

[1587] In some embodiments, the AAV particles of the disclosure may be formulated in a solution comprising 192 mM sodium chloride, 10 mM sodium phosphate (dibasic), 2.7 mM potassium chloride, 2 mM potassium phosphate (monobasic) and 0.001% pluronic F-68 (v/v), at pH 7.4. This formulation is referred to as Formulation 1 in the present disclosure.

[1588] In some embodiments, the AAV particles of the disclosure may be formulated in a solution comprising about 192 mM sodium chloride, about 10 mM sodium phosphate dibasic and about 0.001% poloxamer 188, at a pH of about 7.3. The concentration of sodium chloride in the final solution may be 150 mM-200 mM. As non-limiting examples, the concentration of sodium chloride in the final solution may be 150 mM, 160 mM, 170 mM, 180 mM, 190 mM or 200 mM. The concentration of sodium phosphate dibasic in the final solution may be 1 mM-50 mM. As non-limiting examples, the concentration of sodium phosphate dibasic in the final solution may be 1 mM, 2 mM, 3 mM, 4 mM, 5 mM, 6 mM, 7 mM, 8 mM, 9 mM, 10 mM, 15 mM, 20 mM, 25 mM, 30 mM, 40 mM, or 50 mM. The concentration of poloxamer 188 (pluronic acid (F-68)) may be 0.0001%-1%. As non-limiting examples, the concentration of poloxamer 188 (pluronic acid (F-68)) may be 0.0001%, 0.0005%, 0.001%, 0.005%, 0.01%, 0.05%, 0.1%, 0.5%, or 1%. The final solution may have a pH of 6.8-7.7. Non-limiting examples for the pH of the final solution include a pH of 6.8, 6.9, 7.0, 7.1, 7.2, 7.3, 7.4, 7.5, 7.6, or 7.7.

[1589] In some embodiments, the AAV particles of the disclosure may be formulated in a solution comprising about 1.05% sodium chloride, about 0.212% sodium phosphate dibasic, heptahydrate, about 0.025% sodium phosphate monobasic, monohydrate, and 0.001% poloxamer 188, at a pH of about 7.4. As a non-limiting example, the concentration of AAV particle in this formulated solution may be about 0.001%. The concentration of sodium chloride in the final solution may be 0.1-2.0%, with non-limiting examples of 0.1%, 0.25%, 0.5%, 0.75%, 0.95%, 0.96%, 0.97%, 0.98%, 0.99%, 1.00%, 1.01%, 1.02%, 1.03%, 1.04%, 1.05%, 1.06%, 1.07%, 1.08%, 1.09%, 1.10%, 1.25%, 1.5%, 1.75%, or 2%. The concentration of sodium phosphate dibasic in the final solution may be 0.100-0.300% with non-limiting examples including 0.100%, 0.125%, 0.150%, 0.175%, 0.200%, 0.210%, 0.211%, 0.212%, 0.213%, 0.214%, 0.215%, 0.225%, 0.250%, 0.275%, 0.300%. The concentration of sodium phosphate monobasic in the final solution may be 0.010-0.050%, with non-limiting examples of 0.010%, 0.015%, 0.020%, 0.021%, 0.022%, 0.023%, 0.024%, 0.025%, 0.026%, 0.027%, 0.028%, 0.029%, 0.030%, 0.035%, 0.040%, 0.045%, or 0.050%. The concentration of poloxamer 188 (pluronic acid (F-68)) may be 0.0001%-1%. As non-limiting examples, the concentration of poloxamer 188 (pluronic acid (F-68)) may be 0.0001%, 0.0005%, 0.001%, 0.005%, 0.01%, 0.05%, 0.1%, 0.5%, or 1%. The final solution may have a pH of 6.8-7.7. Non-limiting examples for the pH of the final solution include a pH of 6.8, 6.9, 7.0, 7.1, 7.2, 7.3, 7.4, 7.5, 7.6, or 7.7.

### Excipients

[1590] The formulations of the disclosure can include one or more excipients, each in an amount that together increases the stability of the AAV particle, increases cell transfection or transduction by the viral particle, increases the expression of viral particle encoded protein, and/or alters the release profile of AAV particle encoded proteins. In some embodiments, a pharmaceutically acceptable excipient may be at least 95%, at least 96%, at least 97%, at least 98%, at least 99%, or 100% pure. In some embodiments, an excipient is approved for use for humans and for veterinary use. In some embodiments, an excipient may be approved by United States Food and Drug Administration. In some embodiments, an excipient may be of pharmaceutical grade. In some embodiments, an excipient may meet the standards of the United States Pharmacopoeia (USP), the European Pharmacopoeia (EP), the British Pharmacopoeia, and/or the International Pharmacopoeia.

[1591] Excipients, which, as used herein, include, but are not limited to, any and all solvents, dispersion media, diluents, or other liquid vehicles, dispersion or suspension aids, surface active agents, isotonic agents, thickening or emulsifying agents, preservatives, and the like, as suited to the particular dosage form desired. Various excipients for formulating pharmaceutical compositions and techniques for preparing the composition are known in the art (see Remington: The Science and Practice of Pharmacy, 21st Edition, A. R. Gennaro, Lippincott, Williams & Wilkins, Baltimore, MD, 2006; the contents of which are herein incorporated by reference in their entirety). The use of a conventional excipient medium may be contemplated within the scope of the present disclosure, except insofar as any conventional excipient medium may be incompatible with a substance or its derivatives, such as by producing any undesirable biological effect or otherwise interacting in a deleterious manner with any other component(s) of the pharmaceutical composition.

### Inactive Ingredients

[1592] In some embodiments, AAV formulations may comprise at least one excipient which is an inactive ingredient. As used herein, the term “inactive ingredient” refers to one or more agents that do not contribute to the activity of the pharmaceutical composition included in formulations. In some embodiments, all, none, or some of the inactive ingredients which may be used in the formulations of the present disclosure may be approved by the US Food and Drug Administration (FDA).

[1593] Formulations of AAV particles disclosed herein may include cations or anions. In some embodiments, the formulations include metal cations such as, but not limited to, Zn²⁺, Ca²⁺, Cu²⁺, Mg⁺, or combinations thereof. In some embodiments, formulations may include polymers or polynucleotides complexed with a metal cation (see, e.g., U.S. Pat. Nos. 6,265,389 and 6,555,525, the contents of each of which are herein incorporated by reference in their entirety).

### VII. Uses and Applications

[1594] Provided in the present disclosure are methods for introducing the SOD1 targeting polynucleotides described herein into cells, the method comprising introducing into said cells any of the polynucleotides in an amount sufficient for degradation of target SOD1 mRNA to occur. In some aspects, the cells may be stem cells, neurons such as motor neurons, muscle cells and glial cells such as astrocytes.

[1595] Described here are methods for delivering AAV particles to the spinal cord, for the treatment of disorders associated with the spinal cord, such as, but not limited to motor neuron disease (e.g., ALS). In certain embodiments, these methods result in trans-synaptic transmission.

[1596] Disclosed herein are also methods for treating ALS associated with abnormal SOD1 function in a subject in need of treatment. The method optionally comprises administering to the subject a therapeutically effective amount of a composition comprising or encoding at least one siRNA duplex targeting SOD1 gene. Said siRNA duplex will silence SOD1 gene expression and inhibit SOD1 protein production and reduce one or more symptoms of ALS in the subject such that ALS is therapeutically treated.

[1597] In some embodiment, administration to a subject will reduce the expression of mutant and/or wild-type SOD1 in the central nervous system (e.g., brain tissue, spinal cord, and/or motor neurons) and/or and the reduction of expression of the mutant and/or wild-type SOD1 will reduce the effects of ALS in a subject.

[1598] In some embodiment, the administration is to a subject who is in the early stages of ALS. Early stage symptoms include, but are not limited to, muscles which are weak and soft or stiff, tight and spastic, cramping and twitching (fasciculations) of muscles, loss of muscle bulk (atrophy), fatigue, poor balance, slurred words, weak grip, and/or tripping when walking. The symptoms may be limited to a single body region or a mild symptom may affect more than one region. As a non-limiting example, administration of the AAV viral particle may reduce the severity and/or occurrence of the symptoms of ALS.

[1599] In some embodiment, the administration is to a subject who is in the middle stages of ALS. The middle stage of ALS includes, but is not limited to, more widespread muscle symptoms as compared to the early stage, some muscles are paralyzed while others are weakened or unaffected, continued muscle twitchings (fasciculations), unused muscles may cause contractures where the joints become rigid, painful and sometimes deformed, weakness in swallowing muscles may cause choking and greater difficulty eating and managing saliva, weakness in breathing muscles can cause respiratory insufficiency which can be prominent when lying down, and/or a subject may have bouts of uncontrolled and inappropriate laughing or crying (pseudobulbar affect). As a non-limiting example, administration of the AAV particles may reduce the severity and/or occurrence of the symptoms of ALS.

[1600] In one embodiment, the administration is to a subject who is in the late stages of ALS. The late stage of ALS includes, but is not limited to, voluntary muscles which are mostly paralyzed, the muscles that help move air in and out of the lungs are severely compromised, mobility is extremely limited, poor respiration may cause fatigue, fuzzy thinking, headaches and susceptibility to infection or diseases (e.g., pneumonia), speech is difficult and eating or drinking by mouth may not be possible.

[1601] In some embodiments, the AAV particles may be used to treat a subject with ALS who has a C9orf72 mutation, TDP-43 mutations, and/or FUS mutations.

[1602] In some embodiments, the SOD1 targeting polynucleotide of the present disclosure or the composition comprising or encoding the polynucleotides is administered to the central nervous system of the subject. In other embodiments, the siRNA duplex of the present disclosure or the composition comprising it is administered to the muscles of the subject

[1603] In particular, the SOD1 targeting polynucleotides may be delivered into specific types of targeted cells, including motor neurons; glial cells including oligodendrocyte, astrocyte and microglia; and/or other cells surrounding neurons such as T cells. Studies in human ALS patients and animal SOD1 ALS model implicated that glial cells play an early role in the dysfunction and death of ALS neurons. Normal SOD1 in the surrounding, protective glial cells can prevent the motor neurons from dying even though mutant SOD1 is present in motor neurons (e.g., reviewed by Philips and Rothstein, Exp. Neurol., 2014, May 22. pii: 50014-4886(14)00157-5; the content of which is incorporated herein by reference in its entirety).

[1604] In some specific embodiments, at least one siRNA duplex targeting SOD1 gene used as a therapy for ALS is inserted in an AAV viral genome.

[1605] In some embodiments, the present composition is administered as a single therapeutic or combination therapeutics for the treatment of ALS.

[1606] The viral vectors comprising or encoding siRNA duplexes targeting SOD1 gene may be used in combination with one or more other therapeutic, agents. By “in combination with,” it is not intended to imply that the agents must be administered at the same time and/or formulated for delivery together, although these methods of delivery are within the scope of the present disclosure. Compositions can be administered concurrently with, prior to, or subsequent to, one or more other desired therapeutics or medical procedures. In general, each agent will be administered at a dose and/or on a time schedule determined for that agent.

[1607] Therapeutic agents that may be used in combination with the SOD1 targeting polynucleotides of the present disclosure can be small molecule compounds which are antioxidants, anti-inflammatory agents, anti-apoptosis agents, calcium regulators, antiglutamatergic agents, structural protein inhibitors, and compounds involved in metal ion regulation.

[1608] Compounds used in combination for treating ALS may include, but are not limited to, agents that reduce oxidative stress, such as free-radical scavengers, or Radicava (edaravone), antiglutamatergic agents: Riluzole, Topiramate, Talampanel, Lamotrigine, Dextromethorphan, Gabapentin and AMPA antagonist; Anti-apoptosis agents: Minocycline, Sodium phenylbutyrate and Arimoclomol; Anti-inflammatory agent: ganglioside, Celecoxib, Cyclosporine, Azathioprine, Cyclophosphamide, Plasmaphoresis, Glatiramer acetate and thalidomide; Ceftriaxone (Berry et al., Plos One, 2013, 8(4)); Beat-lactam antibiotics; Pramipexole (a dopamine agonist) (Wang et al., Amyotrophic Lateral Scler., 2008, 9(1), 50-58); Nimesulide in U.S. Patent Publication No. 20060074991; Diazoxide disclosed in U.S. Patent Publication No. 20130143873); pyrazolone derivatives disclosed in US Patent Publication No. 20080161378; free radical scavengers that inhibit oxidative stress-induced cell death, such as bromocriptine (US. Patent Publication No. 20110105517); phenyl carbamate compounds discussed in PCT Patent Publication No. 2013100571; neuroprotective compounds disclosed in U.S. Pat. Nos. 6,933,310 and 8,399,514 and US Patent Publication Nos. 20110237907 and 20140038927; and glycopeptides taught in U.S. Patent Publication No. 20070185012; the content of each of which is incorporated herein by reference in their entirety.

[1609] Therapeutic agents that may be used in combination therapy with the siRNA duplexes targeting SOD1 gene of the present disclosure may be hormones or variants that can protect neuron loss, such as adrenocorticotropic hormone (ACTH) or fragments thereof (e.g., U.S. Patent Publication No. 20130259875); Estrogen (e.g., U.S. Pat. Nos. 6,334,998 and 6,592,845); the content of each of which is incorporated herein by reference in their entirety.

[1610] Neurotrophic factors may be used in combination therapy with the siRNA duplexes targeting SOD1 gene of the present disclosure for treating ALS. Generally, a neurotrophic factor is defined as a substance that promotes survival, growth, differentiation, proliferation and/or maturation of a neuron, or stimulates increased activity of a neuron. In some embodiments, the present methods further comprise delivery of one or more trophic factors into the subject in need of treatment. Trophic factors may include, but are not limited to, IGF-I, GDNF, BDNF, CTNF, VEGF, Colivelin, Xaliproden, Thyrotrophin-releasing hormone and ADNF, and variants thereof.

[1611] In one aspect, the AAV particle comprising at least one siRNA duplex targeting SOD1 gene may be co-administered with AAV particle expressing neurotrophic factors such as AAV-IGF-I (Vincent et al., Neuromolecular medicine, 2004, 6, 79-85; the content of which is incorporated herein by reference in its entirety) and AAV-GDNF (Wang et al., J Neurosci., 2002, 22, 6920-6928; the content of which is incorporated herein by reference in its entirety).

### VIII. Dosing and Administration

### Administration

[1612] In some aspects, the present disclosure provides administration and/or delivery methods for vectors and viral particles, e.g., AAV particles, a SOD1 targeting polynucleotide or a variant thereof, for the prevention, treatment, or amelioration of diseases or disorders of the CNS. For example, administration of the AAV particles prevents, treats, or ameliorates SOD1-related disorders. Thus, robust widespread SOD1 targeting siRNA distribution throughout the CNS and periphery is desired for maximal efficacy. Particular target tissues for administration or delivery include CNS tissues, more specifically, brain tissue.

[1613] In some aspects, the present disclosure relates to a method of delivering an exogenous siRNA duplex for inhibiting expression of SOD1 to a subject, comprising administering an effective amount of the pharmaceutical composition or the AAV particle described herein to a subject, thereby delivering the exogenous siRNA duplex to the subject.

[1614] In specific embodiments, compositions including AAV particles comprising at least one SOD1 targeting polynucleotide may be administered in a way which allows them to enter the central nervous system and penetrate into motor neurons.

[1615] The AAV particles of the present disclosure may be administered by any route which results in a therapeutically effective outcome. These include, but are not limited to, enteral (into the intestine), gastroenteral, epidural (into the dura matter), oral (by way of the mouth), transdermal, peridural, intracerebral (into the cerebrum), intracerebroventricular (into the cerebral ventricles), intracranial (into the skull), picutaneous (application onto the skin), intradermal, (into the skin itself), subcutaneous (under the skin), nasal administration (through the nose), intravenous (into a vein), intravenous bolus, intravenous drip, intraarterial (into an artery), intramuscular (into a muscle), intracardiac (into the heart), intraosseous infusion (into the bone marrow), intraparenchymal (into the substance of), intrathecal (into the spinal canal), intraperitoneal, (infusion or injection into the peritoneum), intravesicular infusion, intravitreal, (through the eye), intracavernous injection (into a pathologic cavity) intracavitary (into the base of the penis), intravaginal administration, intrauterine, extra-amniotic administration, transdermal (diffusion through the intact skin for systemic distribution), transmucosal (diffusion through a mucous membrane), transvaginal, insufflation (snorting), sublingual, sublabial, enema, eye drops (onto the conjunctiva), in ear drops, auricular (in or by way of the ear), buccal (directed toward the cheek), conjunctival, cutaneous, dental (to a tooth or teeth), electro-osmosis, endocervical, endosinusial, endotracheal, extracorporeal, hemodialysis, infiltration, interstitial, intra-abdominal, intra-amniotic, intra-articular, intrabiliary, intrabronchial, intrabursal, intracartilaginous (within a cartilage), intracaudal (within the cauda equine), intracisternal (within the cisterna magna cerebellomedularis), intracorneal (within the cornea), dental intracoronal, intracoronary (within the coronary arteries), intracorporus cavernosum (within the dilatable spaces of the corporus cavernosa of the penis), intradiscal (within a disc), intraductal (within a duct of a gland), intraduodenal (within the duodenum), intradural (within or beneath the dura), intraepidermal (to the epidermis), intraesophageal (to the esophagus), intragastric (within the stomach), intragingival (within the gingivae), intraileal (within the distal portion of the small intestine), intralesional (within or introduced directly to a localized lesion), intraluminal (within a lumen of a tube), intralymphatic (within the lymph), intramedullary (within the marrow cavity of a bone), intrameningeal (within the meninges), intraocular (within the eye), intraovarian (within the ovary), intrapericardial (within the pericardium), intrapleural (within the pleura), intraprostatic (within the prostate gland), intrapulmonary (within the lungs or its bronchi), intrasinal (within the nasal or periorbital sinuses), intraspinal (within the vertebral column), intrasynovial (within the synovial cavity of a joint), intratendinous (within a tendon), intratesticular (within the testicle), intrathecal (within the cerebrospinal fluid at any level of the cerebrospinal axis), intrathoracic (within the thorax), intratubular (within the tubules of an organ), intratumor (within a tumor), intratympanic (within the aurus media), intravascular (within a vessel or vessels), intraventricular (within a ventricle), iontophoresis (by means of electric current where ions of soluble salts migrate into the tissues of the body), irrigation (to bathe or flush open wounds or body cavities), laryngeal (directly upon the larynx), nasogastric (through the nose and into the stomach), occlusive dressing technique (topical route administration which is then covered by a dressing which occludes the area), ophthalmic (to the external eye), oropharyngeal (directly to the mouth and pharynx), parenteral, percutaneous, periarticular, peridural, perineural, periodontal, rectal, respiratory (within the respiratory tract by inhaling orally or nasally for local or systemic effect), retrobulbar (behind the pons or behind the eyeball), soft tissue, subarachnoid, subconjunctival, submucosal, subpial, topical, transplacental (through or across the placenta), transtracheal (through the wall of the trachea), transtympanic (across or through the tympanic cavity), ureteral (to the ureter), urethral (to the urethra), vaginal, caudal block, diagnostic, nerve block, biliary perfusion, cardiac perfusion, photopheresis or spinal.

[1616] In some embodiments, AAV particles of the present disclosure are administered so as to be delivered to a target cell or tissue. Delivery to a target cell results in SOD1 targeting siRNA expression. A target cell may be any cell in which it is considered desirable to increase SOD1 targeting siRNA expression levels. A target cell may be a CNS cell. Non-limiting examples of such cells and/or tissues include, dorsal root ganglia and dorsal columns, proprioceptive sensory neurons, Clark's column, gracile and cuneate nuclei, cerebellar dentate nucleus, corticospinal tracts and the cells comprising the same, Betz cells, and cells of the heart.

[1617] In some embodiments, compositions may be administered in a way that allows them to cross the blood-brain barrier, vascular barrier, or other epithelial barrier.

[1618] In some embodiments, delivery of SOD1 targeting siRNA by adeno-associated virus (AAV) particles to cells of the central nervous system (e.g., parenchyma) comprises infusion into cerebrospinal fluid (CSF). CSF is produced by specialized ependymal cells that comprise the choroid plexus located in the ventricles of the brain. CSF produced within the brain then circulates and surrounds the central nervous system including the brain and spinal cord. CSF continually circulates around the central nervous system, including the ventricles of the brain and subarachnoid space that surrounds both the brain and spinal cord, while maintaining a homeostatic balance of production and reabsorption into the vascular system. The entire volume of CSF is replaced approximately four to six times per day or approximately once every four hours, though values for individuals may vary.

[1619] In some embodiments, the AAV particles may be delivered by systemic delivery. In some embodiments, the systemic delivery may be by intravascular administration. In some embodiments, the systemic delivery may be by intravenous (IV) administration.

[1620] In some embodiments, the AAV particles may be delivered by intravenous delivery.

[1621] In some embodiments, the AAV particle is administered to the subject via focused ultrasound (FUS), e.g., coupled with the intravenous administration of microbubbles (FUS-MB), or MRI-guided FUS coupled with intravenous administration, e.g., as described in Terstappen et al. (Nat Rev Drug Discovery, https://doi.org/10.1038/s41573-021-00139-y (2021)), Burgess et al. (Expert Rev Neurother. 15(5): 477-491 (2015)), and/or Hsu et al. (PLOS One 8(2): 1-8), the contents of which are incorporated herein by reference in its entirety.

[1622] In some embodiments, the AAV particles may be delivered by injection into the CSF pathway. Non-limiting examples of delivery to the CSF pathway include intrathecal and intracerebroventricular administration.

[1623] In some embodiments, the AAV particles may be delivered by thalamic delivery.

[1624] In some embodiments, the AAV particles may be delivered by intracerebral delivery.

[1625] In some embodiments, the AAV particles may be delivered by intracardiac delivery.

[1626] In some embodiments, the AAV particles may be delivered by intracranial delivery. (See, e.g., U.S. Pat. No. 8,119,611; the content of which is incorporated herein by reference in its entirety).

[1627] In some embodiments, the AAV particles may be delivered by intra cisterna magna (ICM) delivery (i.e., the space around and below the cerebellum via the opening between the skull and the top of the spine). In certain embodiments, the pharmaceutical compositions of the present disclosure may be administered to the cisterna magna in a therapeutically effective amount to transduce spinal cord motor neurons and/or astrocytes. In some embodiments, the AAV particles may be delivered via infusion or injection to the cisterna magna. The administration to the cisterna magna may occur via a bolus injection. Depending on the severity of the symptoms and the responsiveness of the subject to the therapy, the bolus injection may be administered once per week, once per month, once every two months, once every three months, once every 6 months or annually. The administration to the cisterna magna may occur via a catheter or canula. In other embodiments, the administration is achieved by use of an infusion pump. The administration may occur continually over a period of at least several days.

[1628] In some embodiments, the AAV particles may be delivered by direct (intraparenchymal) injection into an organ (e.g., CNS (brain or spinal cord)). In some embodiments, the intraparenchymal delivery may be to any region of the brain or CNS. In some embodiments, the AAV particles may be administered by intraparenchymal injection to the CNS, the brain and/or the spinal cord. As a non-limiting example, the AAV particles of the present disclosure may be administered to a subject by intraparenchymal injection. In certain embodiments, the intraparenchymal injection may be a spinal intraparenchymal injection, wherein the pharmaceutical compositions may be administered directly to the tissue of the spinal cord. In certain embodiments, the intraparenchymal injection may be a CNS (central nervous system) intraparenchymal injection wherein the pharmaceutical compositions may be administered directly to the tissue of the CNS.

[1629] In some embodiments, the AAV particles may be administered by intraparenchymal injection and intrathecal injection. In certain embodiments, the pharmaceutical compositions of the present disclosure may be administered by intraparenchymal injection and intrastriatal injection.

[1630] In some embodiments, the AAV particles may be delivered by intrastriatal injection.

[1631] In some embodiments, the AAV particles may be delivered into the putamen.

[1632] In some embodiments, the AAV particles may be delivered into the spinal cord.

[1633] In some embodiments, the AAV particles of the present disclosure may be administered to the ventricles of the brain.

[1634] In some embodiments, the AAV particles of the present disclosure may be administered to the ventricles of the brain by intracerebroventricular delivery.

[1635] In some embodiments, the AAV particles of the present disclosure may be administered by intramuscular delivery. Rizvanov et al. demonstrated for the first time that siRNA molecules, targeting mutant human SOD1 mRNA, is taken up by the sciatic nerve, retrogradely transported to the perikarya of motor neurons, and inhibits mutant SOD1 mRNA in SOD1^{G93A} transgenic ALS mice (Rizvanov A A et al., Exp. Brain Res., 2009, 195(1), 1-4; the content of which is incorporated herein by reference in its entirety). Another study also demonstrated that muscle delivery of AAV expressing small hairpin RNAs (shRNAs) against the mutant SOD1 gene, led to significant mutant SOD1 knockdown in the muscle as well as innervating motor neurons (Towne C et al., Mol Ther., 2011; 19(2): 274-283; the content of which is incorporated herein by reference in its entirety).

[1636] In some embodiments, AAV particles that express siRNA duplexes of the present disclosure may be administered to a subject by peripheral injections and/or intranasal delivery. It was disclosed in the art that the peripheral administration of AAV particles for siRNA duplexes can be transported to the central nervous system, for example, to the motor neurons (e.g., U.S. Patent Publication Nos. 20100240739; and 20100130594; the content of each of which is incorporated herein by reference in their entirety).

[1637] In some embodiments, the AAV particles of the present disclosure are administered by more than one route described above. As a non-limiting example, the AAV particles may be administered by intravenous delivery and thalamic delivery.

[1638] In some embodiments, the AAV particles of the present disclosure are administered by more than one route described above. As a non-limiting example, the AAV particles may be administered by intravenous delivery and intracerebral delivery.

[1639] In some embodiments, the AAV particles of the present disclosure are administered by more than one route described above. As a non-limiting example, the AAV particles may be administered by intravenous delivery and intracranial delivery.

[1640] In some embodiments, the AAV particles of the present disclosure are administered by more than one route described above. In some embodiments, the AAV particles of the present disclosure may be delivered by intrathecal and intracerebroventricular administration.

[1641] In some embodiments, the AAV particles may be delivered to a subject to preserve neurons. The neurons may be primary and/or secondary sensory neurons. In some embodiments, AAV particles are delivered to dorsal root ganglia and/or neurons thereof. In some embodiments, AAV particles are delivered to motor neurons.

[1642] In some embodiments, the AAV particles may be delivered to a subject to improve and/or correct mitochondrial dysfunction.

[1643] In some embodiments, administration of the AAV particles may preserve and/or correct function in the sensory pathways.

[1644] In some embodiments, the AAV particles may be delivered via intravenous (IV), intracerebroventricular (ICV), intraparenchymal, and/or intrathecal (IT) infusion and the therapeutic agent may also be delivered to a subject via intramuscular (IM) limb infusion in order to deliver the therapeutic agent to the skeletal muscle. Delivery of AAVs by intravascular limb infusion is described by Gruntman and Flotte, Human Gene Therapy Clinical Development, 2015, 26(3), 159-164, the contents of which are herein incorporated by reference in their entirety.

[1645] In some embodiments, delivery of viral vector pharmaceutical compositions in accordance with the present disclosure to cells of the central nervous system (e.g., parenchyma) comprises a rate of delivery defined by VG/hour=mL/hour*VG/mL, wherein VG is viral genomes, VG/mL is composition concentration, and mL/hour is rate of infusion.

[1646] In some embodiments, delivery of AAV particle pharmaceutical compositions in accordance with the present disclosure to cells of the central nervous system (e.g., parenchyma) comprises infusion of up to 1 mL. In some embodiments, delivery of viral vector pharmaceutical compositions in accordance with the present disclosure to cells of the central nervous system (e.g., parenchyma) may comprise infusions of 0.0001, 0.0002, 0.001, 0.002, 0.003, 0.004, 0.005, 0.008, 0.010, 0.015, 0.020, 0.025, 0.030, 0.040, 0.050, 0.060, 0.070, 0.080, 0.090, 0.1, 0.2, 0.3, 0.4, 0.5, 0.6, 0.7, 0.8, or 0.9 mL.

[1647] In certain embodiments, the AAV particle described herein is administered via intraparenchymal (IPa) infusion at any level of the spinal cord, at a single or at multiple sites, at a volume of more than 1 uL. In certain embodiments, a volume of 1 uL-100 uL is administered.

[1648] The spinal cord is situated within the spine. The spine consists of a series of vertebral segments. There are 7 cervical (C1-C7), 12 thoracic (T1-T12), 5 lumbar (L1-L5), and 5 sacral (S1-S5) vertebral segments. Intraparenchymal injection or infusion into the spinal cord of AAV particles described herein may occur at one or multiple of these vertebral segments. For example, intraparenchymal injection or infusion into the spinal cord of AAV particles described herein may occur at 1, 2, 3, 4, 5, or more than 5 sites. The intraparenchymal injection or infusion sites may be at one or more regions independently selected from the cervical spinal cord, the thoracic spinal cord, the lumbar spinal cord, and the sacral spinal cord. In some embodiments, AAV particles described herein are administered via intraparenchymal (IPa) infusion at two sites into the spinal cord.

[1649] In some embodiments, the AAV particle described herein may be administered via intraparenchymal (IPa) infusion to one or more sites (e.g., 2, 3, 4 or 5 sites) selected from C1, C2, C3, C4, C5, C6, and C7. In some embodiments, the AAV particle described herein may be administered via intraparenchymal (IPa) infusion to one or more sites (e.g., 2, 3, 4 or 5 sites) selected from T1, T2, T3, T4, T5, T6, T7, T8, T9, T10, T11, and T12. In some embodiments, the AAV particle described herein may be administered via intraparenchymal (IPa) infusion to one or more sites (e.g., 2, 3, 4 or 5 sites) selected from L1, L2, L3, L4, and L5. In some embodiments, the AAV particle described herein may be administered via intraparenchymal (IPa) infusion to one or more sites (e.g., 2, 3, 4 or 5 sites) selected from S1, S2, S3, S4, and S5.

[1650] In some embodiments, the AAV particle described herein may be administered via intraparenchymal (IPa) infusion at one or more sites (e.g., 2, 3, 4 or 5 sites) selected from C1, C2, C3, C4, C5, C6, C7, T1, T2, T3, T4, T5, T6, T7, T8, T9, T10, T11, T12, L1, L2, L3, L4, L5, S1, S2, S3, S4, and S5. As a non-limiting example, the administration is at two sites and may include one site from the cervical spinal cord region (e.g., C1-C7) and one site from the thoracic spinal cord region (e.g., T1-T12). As a non-limiting example, the administration is at two sites and may include one site from the thoracic spinal cord region (e.g., T1-T12) and one site from the lumbar spinal cord region (e.g., L1-L5).

[1651] In certain embodiments, the AAV particle described herein encoding siRNA molecules may be administered via intraparenchymal (IPa) infusion at two sites. The AAV particles may be delivered at the same or different volume for both sites. The AAV particles may be delivered at the same or different volumes for both sites. The AAV particles may be delivered at the same or different infusion rates for both sites.

[1652] In some embodiments, IPa infusions (e.g., spinal cord) may result in delivery of the pharmaceutical compositions (i.e., AAV particles) along the extent of the rostral-caudal axis of the spinal cord. In some embodiments, IPa infusions (e.g., spinal cord) yield a rostrocaudal gradient of AAV particle transmission. In some embodiments, IPa infusions (e.g., spinal cord) result in delivery of the pharmaceutical compositions to regions distal to the injection site. While not wishing to be bound by theory, AAV particles of the disclosure may travel the length of the rostral caudal axis of the spinal cord subsequent to IPa infusion at a particular site. In other words, the AAV particles may not confined to the immediate vicinity of the injection site. As a non-limiting example, the AAV particles may be transported by a trans-synaptic (across the synapse) mechanism. This trans-synaptic mechanism may follow a tract or channel present along the rostral-caudal axis of the spinal cord. Additional methods relating to IPa administration are known in the art, including for example U.S. Patent Application Publication US20210254103, which is hereby incorporated by reference in its entirety. Details regarding the effect of SOD1 siRNAs in vitro and in vivo, as well as intraparenchymal administration of SOD1 siRNAs packaged in AAVs, are described in PCT Patent Application Publication WO2020010042, which is hereby incorporated by reference in its entirety, see, e.g., pp 154-175.

[1653] In some embodiments, delivery of AAV particle pharmaceutical compositions in accordance with the present disclosure to cells of the central nervous system (e.g., parenchyma) comprises infusion of between about 1 mL to about 120 mL. In some embodiments, delivery of viral vector pharmaceutical compositions in accordance with the present disclosure to cells of the central nervous system (e.g., parenchyma) may comprise an infusion of 0.1, 1, 1.1, 1.2, 1.3, 1.4, 1.5, 1.6, 1.7, 1.8, 1.9, 2, 3, 4, 5, 6, 7, 8, 9, 10, 11, 12, 13, 14, 15, 16, 17, 18, 19, 20, 21, 22, 23, 24, 25, 26, 27, 28, 29, 30, 31, 32, 33, 34, 35, 36, 37, 38, 39, 40, 41, 42, 43, 44, 45, 46, 47, 48, 49, 50, 51, 52, 53, 54, 55, 56, 57, 58, 59, 60, 61, 62, 63, 64, 65, 66, 67, 68, 69, 70, 71, 72, 73, 74, 75, 76, 77, 78, 79, 80, 81, 82, 83, 84, 85, 86, 87, 88, 89, 90, 91, 92, 93, 94, 95, 96, 97, 98, 99, 100, 101, 102, 103, 104, 105, 106, 107, 108, 109, 110, 111, 112, 113, 114, 115, 116, 117, 118, 119, or 120 mL. In some embodiments delivery of AAV particles to cells of the central nervous system (e.g., parenchyma) comprises infusion of at least 3 mL. In some embodiments, delivery of AAV particles to cells of the central nervous system (e.g., parenchyma) consists of infusion of 3 mL. In some embodiments, delivery of AAV particles to cells of the central nervous system (e.g., parenchyma) comprises infusion of at least 10 mL. In some embodiments, delivery of AAV particles to cells of the central nervous system (e.g., parenchyma) consists of infusion of 10 mL.

[1654] In some embodiments, the volume of the AAV particle pharmaceutical composition delivered to the cells of the central nervous system (e.g., parenchyma) of a subject is 2 μl, 20 μl, 50 μl, 80 μl, 100 μl, 200 μl, 300 μl, 400 μl, 500 μl, 600 μl, 700 μl, 800 μl, 900 μl, 1000 μl, 1100 μl, 1200 μl, 1300 μl, 1400 μl, 1500 μl, 1600 μl, 1700 μl, 1800 μl, 1900 μl, 2000 μl, or more than 2000 μl.

[1655] In some embodiments, the volume of the AAV particle pharmaceutical composition delivered to a region in both hemispheres of a subject brain is 2 μl, 20 μl, 50 μl, 80 μl, 100 μl, 200 μl, 300 μl, 400 μl, 500 μl, 600 μl, 700 μl, 800 μl, 900 μl, 1000 μl, 1100 μl, 1200 μl, 1300 μl, 1400 μl, 1500 μl, 1600 μl, 1700 μl, 1800 μl, 1900 μl, 2000 μl, or more than 2000 μl.

[1656] In certain embodiments, AAV particle or viral vector pharmaceutical compositions in accordance with the present disclosure may be administered at about 10 to about 600 μl/site, about 50 to about 500 μl/site, about 100 to about 400 μl/site, about 120 to about 300 μl/site, about 140 to about 200 μl/site, or about 160 μl/site.

[1657] In some embodiments, the total volume delivered to a subject may be split between one or more administration sites e.g., 1, 2, 3, 4, 5, or more than 5 sites. In some embodiments, the total volume is split between administration to the left and right hemisphere.

### Delivery of AAV Particles

[1658] In some embodiments, the AAV particles or pharmaceutical compositions of the present disclosure may be administered or delivered using the methods for treatment of disease described in U.S. Pat. No. 8,999,948, or International Publication No. WO2014178863, the contents of which are herein incorporated by reference in their entirety.

[1659] In some embodiments, the AAV particles or pharmaceutical compositions of the present disclosure may be administered or delivered using the methods for delivering gene therapy in Alzheimer's Disease or other neurodegenerative conditions as described in US Application No. 20150126590, the contents of which are herein incorporated by reference in their entirety.

[1660] In some embodiments, the AAV particles or pharmaceutical compositions of the present disclosure may be administered or delivered using the methods for delivery of a CNS gene therapy as described in U.S. Pat. Nos. 6,436,708, and 8,946,152, and International Publication No. WO2015168666, the contents of which are herein incorporated by reference in their entirety.

[1661] In some embodiments, the AAV particles of the present disclosure may be administered or delivered using the methods for the delivery of AAV virions described in European Patent Application No. EP1857552, the contents of which are herein incorporated by reference in their entirety.

[1662] In some embodiments, the AAV particle or pharmaceutical compositions of the present disclosure may be administered or delivered using the methods for delivering proteins using AAV particles described in European Patent Application No. EP2678433, the contents of which are herein incorporated by reference in their entirety.

[1663] In some embodiments, the viral vector encoding a SOD1 targeting siRNA may be administered or delivered using the methods for delivering DNA molecules using AAV particles described in U.S. Pat. No. 5,858,351, the contents of which are herein incorporated by reference in their entirety.

[1664] In some embodiments, the AAV particle or pharmaceutical compositions of the present disclosure may be administered or delivered using the methods for delivering DNA to the bloodstream described in U.S. Pat. No. 6,211,163, the contents of which are herein incorporated by reference in their entirety.

[1665] In some embodiments, the viral vector encoding a SOD1 targeting siRNA may be administered or delivered using the methods for delivering AAV virions described in U.S. Pat. No. 6,325,998, the contents of which are herein incorporated by reference in their entirety.

[1666] In some embodiments, the viral vector encoding a SOD1 targeting siRNA may be administered or delivered using the methods for delivering DNA to muscle cells described in U.S. Pat. No. 6,335,011, the contents of which are herein incorporated by reference in their entirety.

[1667] In some embodiments, the viral vector encoding a SOD1 targeting siRNA may be administered or delivered using the methods for delivering DNA to muscle cells and tissues described in U.S. Pat. No. 6,610,290, the contents of which are herein incorporated by reference in their entirety.

[1668] In some embodiments, the viral vector encoding a SOD1 targeting siRNA may be administered or delivered using the methods for delivering DNA to muscle cells described in U.S. Pat. No. 7,704,492, the contents of which are herein incorporated by reference in their entirety.

[1669] In some embodiments, the viral vector encoding a SOD1 targeting siRNA may be administered or delivered using the methods for delivering a payload to skeletal muscles described in U.S. Pat. No. 7,112,321, the contents of which are herein incorporated by reference in their entirety.

[1670] In some embodiments, the AAV particle or pharmaceutical compositions of the present disclosure may be administered or delivered using the methods for delivering a payload to the central nervous system described in U.S. Pat. No. 7,588,757, the contents of which are herein incorporated by reference in their entirety.

[1671] In some embodiments, the AAV particle or pharmaceutical compositions of the present disclosure may be administered or delivered using the methods for delivering a payload described in U.S. Pat. No. 8,283,151, the contents of which are herein incorporated by reference in their entirety.

[1672] In some embodiments, the AAV particle or pharmaceutical compositions of the present disclosure may be administered or delivered using the methods for delivering a payload for the treatment of Alzheimer disease described in U.S. Pat. No. 8,318,687, the contents of which are herein incorporated by reference in their entirety.

[1673] In some embodiments, the AAV particle or pharmaceutical compositions of the present disclosure may be administered or delivered using the methods for delivering a payload described in International Patent Publication No. WO2012144446, the contents of which are herein incorporated by reference in their entirety.

[1674] In some embodiments, the AAV particle or pharmaceutical compositions of the present disclosure may be administered or delivered using the methods for delivering a payload using a glutamic acid decarboxylase (GAD) delivery vector described in International Patent Publication No. WO2001089583, the contents of which are herein incorporated by reference in their entirety.

[1675] In some embodiments, the AAV particle or pharmaceutical compositions of the present disclosure may be administered or delivered using the methods for delivering a payload to neural cells described in International Patent Publication No. WO2012057363, the contents of which are herein incorporated by reference in their entirety.

[1676] In some embodiments, the AAV particle or pharmaceutical compositions of the present disclosure may be administered or delivered using the methods for delivering a payload described in International Patent Publication No. WO2001096587, the contents of which are herein incorporated by reference in their entirety.

[1677] In some embodiments, the AAV particle or pharmaceutical compositions of the present disclosure may be administered or delivered using the methods for delivering a payload to muscle tissue described in International Patent Publication No. WO2002014487, the contents of which are herein incorporated by reference in their entirety.

[1678] In some embodiments, a catheter may be used to administer the AAV particles. In certain embodiments, the catheter or cannula may be located at more than one site in the spine for multi-site delivery. The viral particles encoding may be delivered in a continuous and/or bolus infusion. Each site of delivery may be a different dosing regimen or the same dosing regimen may be used for each site of delivery. In some embodiments, the sites of delivery may be in the cervical and the lumbar region. In some embodiments, the sites of delivery may be in the cervical region. In some embodiments, the sites of delivery may be in the lumbar region.

[1679] In some embodiments, a subject may be analyzed for spinal anatomy and pathology prior to delivery of the AAV particles described herein. As a non-limiting example, a subject with scoliosis may have a different dosing regimen and/or catheter location compared to a subject without scoliosis.

[1680] In some embodiments, the delivery method and duration is chosen to provide broad transduction in the spinal cord. In some embodiments, intrathecal delivery is used to provide broad transduction along the rostral-caudal length of the spinal cord. In some embodiments, multi-site infusions provide a more uniform transduction along the rostral-caudal length of the spinal cord.

### Delivery to Cells

[1681] In some aspects, the present disclosure provides a method of delivering to a cell or tissue any of the above-described AAV particles, comprising contacting the cell or tissue with said AAV particle or contacting the cell or tissue with a formulation comprising said AAV particle, or contacting the cell or tissue with any of the described compositions, including pharmaceutical compositions. The method of delivering the AAV particle to a cell or tissue can be accomplished in vitro, ex vivo, or in vivo.

### Delivery to Subjects

[1682] In some aspects, the present disclosure additionally provides a method of delivering to a subject, including a mammalian subject, any of the above-described AAV particles comprising administering to the subject said AAV particle, or administering to the subject a formulation comprising said AAV particle, or administering to the subject any of the described compositions, including pharmaceutical compositions.

[1683] In some embodiments, the AAV particles may be delivered to bypass anatomical blockages such as, but not limited to the blood brain barrier.

[1684] In some embodiments, the AAV particles may be formulated and delivered to a subject by a route which increases the speed of drug effect as compared to oral delivery.

[1685] In some embodiments, the AAV particles may be delivered by a method to provide uniform transduction of the spinal cord and dorsal root ganglion (DRG). In some embodiments, the AAV particles may be delivered using intrathecal infusion.

[1686] In some embodiments, a subject may be administered the AAV particles described herein using a bolus infusion. As used herein, a “bolus infusion” means a single and rapid infusion of a substance or composition.

[1687] In some embodiments, the AAV particles encoding a SOD1 targeting siRNA may be delivered in a continuous and/or bolus infusion. Each site of delivery may be a different dosing regimen or the same dosing regimen may be used for each site of delivery. As a non-limiting example, the sites of delivery may be in the cervical and the lumbar region. As another non-limiting example, the sites of delivery may be in the cervical region. As another non-limiting example, the sites of delivery may be in the lumbar region.

[1688] In some embodiments, the AAV particles may be delivered to a subject via a single route administration.

[1689] In some embodiments, the AAV particles may be delivered to a subject via a multi-site route of administration. For example, a subject may be administered the AAV particles at 2, 3, 4, 5, or more than 5 sites.

[1690] In some embodiments, a subject may be administered the AAV particles described herein using sustained delivery over a period of minutes, hours or days. The infusion rate may be changed depending on the subject, distribution, formulation or another delivery parameter known to those in the art.

[1691] In some embodiments, if continuous delivery (continuous infusion) of the AAV particles is used, the continuous infusion may be for 1 hour, 2, hours, 3 hours, 4 hours, 5 hours, 6 hours, 7 hours, 8 hours, 9 hours, 10 hours, 11 hours, 12 hours, 13 hours, 14 hours, 15 hours, 16 hours, 17 hours, 18 hours, 19 hours, 20 hours, 21 hours, 22 hours, 23 hours, 24 hours, or more than 24 hours.

[1692] In some embodiments, the intracranial pressure may be evaluated prior to administration. The route, volume, AAV particle concentration, infusion duration and/or vector titer may be optimized based on the intracranial pressure of a subject.

[1693] In some embodiments, the AAV particles may be delivered by systemic delivery. In some embodiments, the systemic delivery may be by intravascular administration.

[1694] In some embodiments, the AAV particles may be delivered by injection into the CSF pathway. Non-limiting examples of delivery to the CSF pathway include intrathecal and intracerebroventricular administration.

[1695] In some embodiments, the AAV particles may be delivered by direct (intraparenchymal) injection into the substance of an organ, e.g., one or more regions of the brain.

[1696] In some embodiments, the AAV particles may be delivered by subpial injection into the spinal cord. For example, subjects may be placed into a spinal immobilization apparatus. A dorsal laminectomy may be performed to expose the spinal cord. Guiding tubes and XYZ manipulators may be used to assist catheter placement. Subpial catheters may be placed into the subpial space by advancing the catheter from the guiding tube and AAV particles may be injected through the catheter (Miyanohara et al., Mol Ther Methods Clin Dev. 2016; 3: 16046). In some cases, the AAV particles may be injected into the cervical subpial space. In some cases, the AAV particles may be injected into the thoracic subpial space.

[1697] In some embodiments, the AAV particles may be delivered by direct injection to the CNS of a subject. In some embodiments, direct injection is intracerebral injection, intraparenchymal injection, intrathecal injection, intra-cisterna magna injection, or any combination thereof. In some embodiments, direct injection to the CNS of a subject comprises convection enhanced delivery (CED). In some embodiments, administration comprises peripheral injection. In some embodiments, peripheral injection is intravenous injection.

[1698] In some embodiments, the AAV particles may be delivered to a subject in order to decrease SOD1 activity in the caudate-putamen, thalamus, superior colliculus, cortex, and/or corpus callosum as compared to endogenous levels. In some embodiments, the AAV particles may be delivered to a subject in order to decrease SOD1 activity in the motor and sensory cranial nerves, as well as neurons of the cortex, the hippocampus, and amygdala as compared to endogenous levels. The decrease may be 0.1× to 5×, 0.5× to 5×, 1x to 5×, 2× to 5×, 3× to 5×, 4× to 5×, 0.1× to 4×, 0.5× to 4×, 1× to 4×, 2× to 4×, 3× to 4×, 0.1× to 3×, 0.5× to 3×, 1× to 3×, 2× to 3×, 0.1× to 2×, 0.5× to 2×, 0.1× to 1×, 0.5× to 1×, 0.1× to 0.5×, 1× to 2×, 0.1×, 0.2×, 0.3×, 0.4×, 0.5×, 0.6×, 0.7×, 0.8×, 0.9×, 1.0×, 1.1×, 1.2×, 1.3×, 1.4×, 1.5×, 1.6×, 1.7×, 1.8×, 1.9×, 2.0×, 2.1×, 2.2×, 2.3×, 2.4×, 2.5×, 2.6×, 2.7×, 2.8×, 2.9×, 3.0×, 3.1×, 3.2×, 3.3×, 3.4×, 3.5×, 3.6×, 3.7×, 3.8×, 3.9×, 4.0×, 4.1×, 4.2×, 4.3×, 4.4×, 4.5×, 4.6×, 4.7×, 4.8×, 4.9× or more than 5× as compared to endogenous levels.

[1699] In some embodiments, the AAV particles may be delivered to a subject in order to decrease SOD1 activity levels in the caudate, putamen, thalamus, superior colliculus, cortex, and/or corpus callosum by transducing cells in these CNS regions. In some embodiments, the AAV particles may be delivered to a subject in order to transducing cells in the motor and sensory cranial nerves, as well as neurons of the cortex, the hippocampus, and amygdala by transducing cells in these CNS regions. Transduction may also be referred to as the amount of cells that are positive for the SOD1 targeting siRNA. The transduction may be greater than or equal to 1%, 5%, 10%, 15%, 20%, 25%, 30%, 35%, 40%, 45%, 50%, 55%, 60%, 65%, 70%, 75%, 80%, 85%, 90%, 95%, or 99% of cells in these CNS regions.

[1700] In some embodiments, delivery of AAV particles comprising a viral genome encoding the SOD1 targeting siRNA described herein to motor neurons (e.g., motor neurons or ventral horn motor neurons); glial cells including oligodendrocyte, astrocyte and microglia; and/or other cells surrounding neurons such as T cells, will lead to an decrease in the activity of SOD1. The decreased activity of SOD1 may lead to improved survival and function of various cell types in these CNS regions and subsequent improvement of SOD1-related disorder symptoms.

[1701] In particular embodiments, the AAV particles may be delivered to a subject in order to establish widespread distribution of the SOD1 targeting siRNA throughout the nervous system by administering the AAV particles to the thalamus of the subject.

[1702] In some embodiments, the composition of the present disclosure for treating ALS is administered to the subject in need intravenously, intramuscularly, subcutaneously, intraperitoneally, intrathecally, intraparenchymally (CNS, brain, and/or spinal cord) and/or intraventricularly, allowing the siRNA duplexes or vectors comprising the siRNA duplexes to pass through one or both the blood-brain barrier and the blood spinal cord barrier. In some aspects, the method includes administering (e.g., intraparenchymally administering, intraventricularly administering and/or intrathecally administering) directly to the central nervous system (CNS) of a subject (using, e.g., an infusion pump and/or a delivery scaffold) a therapeutically effective amount of a composition comprising at least one siRNA duplex targeting SOD1 gene or AAV particles comprising at least one siRNA duplex targeting SOD1 gene, silencing/suppressing SOD1 gene expression, and reducing one or more symptoms of ALS in the subject such that ALS is therapeutically treated.

[1703] In some embodiments, the composition of the present disclosure for treating ALS is administered to the subject in need intraparenchymally (CNS, brain, and/or spinal cord), allowing the siRNA duplexes or vectors comprising the siRNA duplexes to pass through one or both the blood-brain barrier and the blood spinal cord barrier.

[1704] In certain aspects, the symptoms of ALS including motor neuron degeneration, muscle weakness, muscle atrophy, the stiffness of muscle, difficulty in breathing, slurred speech, fasciculation development, frontotemporal dementia and/or premature death are improved in the subject treated. In other aspects, the composition of the present disclosure is applied to one or both of the brain and the spinal cord. In other aspects, one or both of muscle coordination and muscle function are improved. In other aspects, the survival of the subject is prolonged.

### Dosing

[1705] In some aspects, the present disclosure provides methods comprising administering viral vectors and their payloads in accordance with the disclosure to a subject in need thereof. Viral vector pharmaceutical, imaging, diagnostic, or prophylactic compositions thereof, may be administered to a subject using any amount and any route of administration effective for preventing, treating, diagnosing, or imaging a disease, disorder, and/or condition (e.g., a disease, disorder, and/or condition associated with SOD1). In some embodiments, the disease, disorder, and/or condition is SOD1-related disorders. The exact amount required will vary from subject to subject, depending on the species, age, and general condition of the subject, the severity of the disease, the particular composition, its mode of administration, its mode of activity, and the like. Compositions in accordance with the disclosure are typically formulated in unit dosage form for ease of administration and uniformity of dosage. It will be understood, however, that the total daily usage of the compositions of the present disclosure may be decided by the attending physician within the scope of sound medical judgment. The specific therapeutically effective, prophylactically effective, or appropriate imaging dose level for any particular patient will depend upon a variety of factors including the disorder being treated and the severity of the disorder; the activity of the specific compound employed; the specific composition employed; the age, body weight, general health, sex, and diet of the patient; the time of administration, route of administration, and rate of excretion of the specific peptide(s) employed; the duration of the treatment; drugs used in combination or coincidental with the specific compound employed; and like factors well known in the medical arts.

[1706] In certain embodiments, AAV particle pharmaceutical compositions in accordance with the present disclosure may be administered at dosage levels sufficient to deliver SOD1 targeting siRNAs from about 0.0001 mg/kg to about 100 mg/kg, from about 0.001 mg/kg to about 0.05 mg/kg, from about 0.005 mg/kg to about 0.05 mg/kg, from about 0.001 mg/kg to about 0.005 mg/kg, from about 0.05 mg/kg to about 0.5 mg/kg, from about 0.01 mg/kg to about 50 mg/kg, from about 0.1 mg/kg to about 40 mg/kg, from about 0.5 mg/kg to about 30 mg/kg, from about 0.01 mg/kg to about 10 mg/kg, from about 0.1 mg/kg to about 10 mg/kg, or from about 1 mg/kg to about 25 mg/kg, of subject body weight per day, one or more times a day, to obtain the desired therapeutic, diagnostic, prophylactic, or imaging effect. It will be understood that the above dosing concentrations may be converted to VG or viral genomes per kg or into total viral genomes administered by one of skill in the art.

[1707] In certain embodiments, the desired dosage may be delivered using multiple administrations (e.g., two, three, four, five, six, seven, eight, nine, ten, eleven, twelve, thirteen, fourteen, or more administrations). When multiple administrations are employed, split dosing regimens such as those described herein may be used. As used herein, a “split dose” is the division of single unit dose or total daily dose into two or more doses, e.g., two or more administrations of the single unit dose. As used herein, a “single unit dose” is a dose of any therapeutic composition administered in one dose/at one time/single route/single point of contact, i.e., single administration event. In some embodiments, a single unit dose is provided as a discrete dosage form (e.g., a tablet, capsule, patch, loaded syringe, vial, etc.). As used herein, a “total daily dose” is an amount given or prescribed in 24-hour period. It may be administered as a single unit dose. The viral particles may be formulated in buffer only or in a formulation described herein.

[1708] A pharmaceutical composition described herein can be formulated into a dosage form described herein, such as a topical, intranasal, pulmonary, intratracheal, or injectable (e.g., intravenous, intraocular, intravitreal, intramuscular, intracardiac, intraperitoneal, and/or subcutaneous).

[1709] In some embodiments, delivery of the AAV particles described herein results in minimal serious adverse events (SAEs) as a result of the delivery of the AAV particles.

[1710] In some embodiments, delivery of AAV particle pharmaceutical compositions in accordance with the present disclosure to cells of the central nervous system (e.g., parenchyma) may comprise a total concentration between about 1×10⁶ VG/mL and about 1×10¹⁶ VG/mL. In some embodiments, delivery may comprise a composition concentration of about 1×10⁶, 2×10⁶, 3×10⁶, 4×10⁶, 5×10⁶, 6×10⁶, 7×10⁶, 8×10⁶, 9×10⁶, 1×10⁷, 2×10⁷, 3×10⁷, 4×10⁷, 5×10⁷, 6×10⁷, 7×10⁷, 8×10⁷, 9×10⁷, 1×10⁸, 2×10⁸, 3×10⁸, 4×10⁸, 5×10⁸, 6×10⁸, 7×10⁸, 8×10⁸, 9×10⁸, 1×10⁹, 2×10⁹, 3×10⁹, 4×10⁹, 5×10⁹, 6×10⁹, 7×10⁹, 8×10⁹, 9×10⁹, 1×10¹⁰, 2×10¹⁰, 3×10¹⁰, 4×10¹⁰, 5×10¹⁰, 6×10¹⁰, 7×10¹⁰, 8×10¹⁰, 9×10¹⁰, 1×10¹¹, 1.6×10¹¹, 1.8×10¹¹, 2×10¹¹, 3×10¹¹, 4×10¹¹, 5×10¹¹, 5.5×10¹¹, 6×10¹¹, 7×10¹¹, 8×10¹¹, 9×10¹¹, 0.8×10¹², 0.83×10¹², 1×10¹², 1.1×10¹², 1.2×10¹², 1.3×10¹², 1.4×10¹², 1.5×10¹², 1.6×10¹², 1.7×10¹², 1.8×10¹², 1.9×10¹², 2×10¹², 2.1×10¹², 2.2×10¹², 2.3×10¹², 2.4×10¹², 2.5×10¹², 2.6×10¹², 2.7×10¹², 2.8×10¹², 2.9×10¹², 3×10¹², 3.1×10², 3.2×10¹², 3.3×10¹², 3.4×10¹², 3.5×10¹², 3.6×10¹², 3.7×10¹², 3.8×10¹², 3.9×10¹², 4×10¹², 4.1×10¹², 4.2×10¹², 4.3×10¹², 4.4×10¹², 4.5×10¹², 4.6×10¹², 4.7×10¹², 4.8×10¹², 4.9×10¹², 5×10¹², 6×10¹², 7×10¹², 8×10¹², 9×10¹², 1×10¹³, 2×10¹³, 2.3×10¹³, 3×10¹³, 4×10¹³, 5×10¹³, 6×10¹³, 7×10¹³, 8×10¹³, 9×10¹³, 1×10¹⁴, 1.9×10¹⁴, 2×10¹⁴, 3×10¹⁴, 4×10¹⁴, 5×10¹⁴, 6×10¹⁴, 7×10¹⁴, 8×10¹⁴, 9×10¹⁴, 1×10¹⁵, 2×10¹⁵, 3×10¹⁵, 4×10¹⁵, 5×10¹⁵, 6×10¹⁵, 7×10¹⁵, 8×10¹⁵, 9×10¹⁵, or 1×10¹⁶ VG/mL.

[1711] In some embodiments, delivery of AAV particle pharmaceutical compositions in accordance with the present disclosure to cells of the central nervous system (e.g., parenchyma) may comprise a total concentration per subject between about 1×10⁶ VG and about 1×10¹⁶ VG. In some embodiments, delivery may comprise a composition concentration of about 1×10⁶, 2×10⁶, 3×10⁶, 4×10⁶, 5×10⁶, 6×10⁶, 7×10⁶, 8×10⁶, 9×10⁶, 1×10⁷, 2×10⁷, 3×10⁷, 4×10⁷, 5×10⁷, 6×10⁷, 7×10⁷, 8×10⁷, 9×10⁷, 1×10⁸, 2×10⁸, 3×10⁸, 4×10⁸, 5×10⁸, 6×10⁸, 7×10⁸, 8×10⁸, 9×10⁸, 1×10⁹, 2×10⁹, 3×10⁹, 4×10⁹, 5×10⁹, 6×10⁹, 7×10⁹, 8×10⁹, 9×10⁹, 1×10¹⁰, 2×10¹⁰, 3×10¹⁰, 4×10¹⁰, 5×10¹⁰, 6×10¹⁰, 7×10¹⁰, 8×10¹⁰, 9×10¹⁰, 1×10¹¹, 1.6×10¹¹, 2×10¹¹, 2.1×10¹¹, 2.2×10¹¹, 2.3×10¹¹, 2.4×10¹¹, 2.5×10¹¹, 2.6×10¹¹, 2.7×10¹¹, 2.8×10¹¹, 2.9×10¹¹, 3×10¹¹, 4×10¹¹, 4.6×10¹¹, 5×10¹¹, 6×10¹¹, 7×10¹¹, 7.1×10¹¹, 7.2×10¹¹, 7.3×10¹¹, 7.4×10¹¹, 7.5×10¹¹, 7.6×10¹¹, 7.7×10¹¹, 7.8×10¹¹, 7.9×10¹¹, 8×10¹¹, 9×10¹¹, 1×10¹², 1.1×10¹², 1.2×10¹², 1.3×10¹², 1.4×10¹², 1.5×10¹², 1.6×10¹², 1.7×10¹², 1.8×10¹², 1.9×10¹², 2×10¹², 2.3×10¹², 3×10¹², 4×10¹², 4.1×10¹², 4.2×10¹², 4.3×10¹², 4.4×10¹², 4.5×10¹², 4.6×10¹², 4.7×10¹², 4.8×10¹², 4.9×10¹², 5×10¹², 6×10¹², 7×10¹², 8×10¹², 8.1×10¹², 8.2×10¹², 8.3×10¹², 8.4×10¹², 8.5×10¹², 8.6×10¹², 8.7×10¹², 8.8×10¹², 8.9×10¹², 9×10¹², 1×10¹³, 2×10¹³, 3×10¹³, 4×10¹³, 5×10¹³, 6×10¹³, 7×10¹³, 8×10¹³, 9×10¹³, 1×10¹⁴, 2×10¹⁴, 3×10¹⁴, 4×10¹⁴, 5×10¹⁴, 6×10¹⁴, 7×10¹⁴, 8×10¹⁴, 9×10¹⁴, 1×10¹⁵, 2×10¹⁵, 3×10¹⁵, 4×10¹⁵, 5×10¹⁵, 6×10¹⁵, 7×10¹⁵, 8×10¹⁵, 9×10¹⁵, or 1×10¹⁶ VG/subject.

[1712] In some embodiments, delivery of AAV particles to cells of the central nervous system (e.g., parenchyma) may comprise a total dose between about 1×10⁶ VG and about 1×10¹⁶ VG. In some embodiments, delivery may comprise a total dose of about 1×10⁶, 2×10⁶, 3×10⁶, 4×10⁶, 5×10⁶, 6×10⁶, 7×10⁶, 8×10⁶, 9×10⁶, 1×10⁷, 2×10⁷, 3×10⁷, 4×10⁷, 5×10⁷, 6×10⁷, 7×10⁷, 8×10⁷, 9×10⁷, 1×10⁸, 2×10⁸, 3×10⁸, 4×10⁸, 5×10⁸, 6×10⁸, 7×10⁸, 8×10⁸, 9×10⁸, 1×10⁹, 2×10⁹, 3×10⁹, 4×10⁹, 5×10⁹, 6×10⁹, 7×10⁹, 8×10⁹, 9×10⁹, 1×10¹⁰, 1.9×10¹⁰, 2×10¹⁰, 3×10¹⁰, 3.73×10¹⁰, 4×10¹⁰, 5×10¹⁰, 6×10¹⁰, 7×10¹⁰, 8×10¹⁰, 9×10¹⁰, 1×10¹¹, 2×10¹¹, 2.5×10¹¹, 3×10¹¹, 4×10¹¹, 5×10¹¹, 6×10¹¹, 7×10¹¹, 8×10¹¹, 9×10¹¹, 1×10¹², 2×10¹², 3×10¹², 4×10¹², 5×10¹², 6×10¹², 7×10¹², 8×10¹², 9×10¹², 1×10¹³, 2×10¹³, 3×10¹³, 4×10¹³, 5×10¹³, 6×10¹³, 7×10¹³, 8×10¹³, 9×10¹³, 1×10¹⁴, 2×10¹⁴, 3×10¹⁴, 4×10¹⁴, 5×10¹⁴, 6×10¹⁴, 7×10¹⁴, 8×10¹⁴, 9×10¹⁴, 1×10¹⁵, 2×10¹⁵, 3×10¹⁵, 4×10¹⁵, 5×10¹⁵, 6×10¹⁵, 7×10¹⁵, 8×10¹⁵, 9×10¹⁵, or 1×10¹⁶ VG.

### Devices

[1713] As used herein, the term “device” refers to any article constructed or modified to suit a particular purpose, such as facilitating the delivery of the pharmaceutical compositions to a subject or the detection of the administered pharmaceutical compositions in a subject.

[1714] In some embodiments, the devices may be utilized for intraparenchymal injection of the pharmaceutical compositions. Devices may also be used to administer the pharmaceutical compositions to the spinal cord.

[1715] In some embodiments, the device may be a custom floating cannula. In certain embodiments, the custom infusion cannula with a narrow diameter is used for the injections. The cannula may include a 30-gauge beveled needle of fixed length connected to a 30-gauge flexible silastic tubing of variable length. The distal end may be fitted with a Hamilton luer lock, which, in turn, may be attached to a microinjector pump. The proximal silastic tubing may be ensheathed within a 24-gauge rigid outer cannula that is seated on the proximal end of the injection needle flange. The flange seats the outer cannula and may serve as a depth stop for the injection needle

[1716] In certain embodiments, the device may be an intraspinal cannula. The intraspinal cannula may include proximal syringe connection and a distal tip. The proximal syringe connection comprises a female luer lock syringe connector which may be connected to a 3-20′ cannula with protective sheathing. The cannula may include a single internal lumen from the distal tip to the syringe. The cannula may include a 4-6″ flexible portion near the distal tip. The distal tip includes a flange/depth stop and a blunt rigid tip. The intraspinal cannula may also include a mechanism for attachment to the subject.

[1717] In certain embodiments, the device may be a complex stereotactic frame.

[1718] In certain embodiments, the device may be a simplified stereotactic frame.

[1719] In certain embodiments, the pharmaceutical compositions may be delivered without a frame.

[1720] In certain embodiments, the device may be magnetic resonance imager. Such imagers when used in conjunction with contrast agents such as Gadolinium can detect the administered pharmaceutical compositions in a subject.

[1721] In certain embodiments, any of the devices described herein may be combined to deliver and/detect the administered pharmaceutical compositions.

### Combinations

[1722] The AAV particles may be used in combination with one or more other therapeutic, prophylactic, diagnostic, or imaging agents. The phrase “in combination with,” is not intended to require that the agents must be administered at the same time and/or formulated for delivery together, although these methods of delivery are within the scope of the present disclosure. Compositions can be administered concurrently with, prior to, or subsequent to, one or more other desired therapeutics or medical procedures. In general, each agent will be administered at a dose and/or on a time schedule determined for that agent. In some embodiments, the present disclosure encompasses the delivery of pharmaceutical, prophylactic, diagnostic, or imaging compositions in combination with agents that may improve their bioavailability, reduce and/or modify their metabolism, and/or modify their distribution within the body.

[1723] The therapeutic agents may be approved by the US Food and Drug Administration or may be in clinical trial or at the preclinical research stage. The therapeutic agents may utilize any therapeutic modality known in the art, with non-limiting examples including gene silencing or interference (i.e., miRNA, siRNA, RNAi, shRNA), gene editing (i.e., TALEN, CRISPR/Cas9 systems, zinc finger nucleases), and gene, protein or enzyme replacement.

### Measurement of Expression

[1724] In some embodiments, the administration further comprises evaluating, e.g., measuring, the level of SOD1 expression, e.g., SOD1 gene, SOD1 mRNA, and/or SOD1 protein expression, in the subject, e.g., in a cell, tissue, or fluid, of the subject. The measuring of the level of SOD1 expression may be performed prior to, during, or subsequent to treatment with the AAV particle.

[1725] Expression of the SOD1 targeting siRNA from viral genomes may be determined using various methods known in the art such as, but not limited to immunochemistry (e.g., IHC), enzyme-linked immunosorbent assay (ELISA), affinity ELISA, ELISPOT, flow cytometry, immunocytology, surface plasmon resonance analysis, kinetic exclusion assay, liquid chromatography-mass spectrometry (LCMS), high-performance liquid chromatography (HPLC), BCA assay, immunoelectrophoresis, Western blot, SDS-PAGE, protein immunoprecipitation, PCR, and/or in situ hybridization (ISH). In some embodiments, transgenes encoding the SOD1 targeting siRNA delivered in different AAV capsids may have different expression levels in different CNS tissues.

[1726] In certain embodiments, the SOD1 targeting siRNA is detectable by Western blot.

### IX. Kits and Devices

### Kits

[1727] In some aspects, the present disclosure provides a variety of kits for conveniently and/or effectively carrying out methods of the present disclosure. Typically, kits will comprise sufficient amounts and/or numbers of components to allow a user to perform multiple treatments of a subject(s) and/or to perform multiple experiments.

[1728] Any of the vectors, constructs, or SOD1 targeting siRNAs of the present disclosure may be comprised in a kit. In some embodiments, kits may further include reagents and/or instructions for creating and/or synthesizing compounds and/or compositions of the present disclosure. In some embodiments, kits may also include one or more buffers. In some embodiments, kits of the disclosure may include components for making protein or nucleic acid arrays or libraries and thus, may include, for example, solid supports.

[1729] In some embodiments, kit components may be packaged either in aqueous media or in lyophilized form. The container means of the kits will generally include at least one vial, test tube, flask, bottle, syringe or other container means, into which a component may be placed, and suitably aliquoted. Where there is more than one kit component, (labeling reagent and label may be packaged together), kits may also generally contain second, third or other additional containers into which additional components may be separately placed. In some embodiments, kits may also comprise second container means for containing sterile, pharmaceutically acceptable buffers and/or other diluents. In some embodiments, various combinations of components may be comprised in one or more vial. Kits of the present disclosure may also typically include means for containing compounds and/or compositions of the present disclosure, e.g., proteins, nucleic acids, and any other reagent containers in close confinement for commercial sale. Such containers may include injection or blow-molded plastic containers into which desired vials are retained.

[1730] In some embodiments, kit components are provided in one and/or more liquid solutions. In some embodiments, liquid solutions are aqueous solutions, with sterile aqueous solutions being particularly used. In some embodiments, kit components may be provided as dried powder(s). When reagents and/or components are provided as dry powders, such powders may be reconstituted by the addition of suitable volumes of solvent. In some embodiments, it is envisioned that solvents may also be provided in another container means. In some embodiments, labeling dyes are provided as dried powders. In some embodiments, it is contemplated that 10, 20, 30, 40, 50, 60, 70, 80, 90, 100, 120, 120, 130, 140, 150, 160, 170, 180, 190, 200, 300, 400, 500, 600, 700, 800, 900, 1000 micrograms or at least or at most those amounts of dried dye are provided in kits of the disclosure. In such embodiments, dye may then be resuspended in any suitable solvent, such as DMSO.

[1731] In some embodiments, kits may include instructions for employing kit components as well the use of any other reagent not included in the kit. Instructions may include variations that may be implemented.

### Devices

[1732] In some embodiments, compounds and/or compositions of the present disclosure may be combined with, coated onto or embedded in a device. Devices may include, but are not limited to, dental implants, stents, bone replacements, artificial joints, valves, pacemakers and/or other implantable therapeutic device.

[1733] The present disclosure provides for devices which may incorporate viral vectors that encode one or more SOD1 targeting polynucleotide. These devices contain in a stable formulation the viral vectors which may be immediately delivered to a subject in need thereof, such as a human patient.

[1734] Devices for administration may be employed to deliver the viral vectors encoding the SOD1 targeting polynucleotide of the present disclosure according to single, multi- or split-dosing regimens taught herein.

[1735] Method and devices known in the art for multi-administration to cells, organs and tissues are contemplated for use in conjunction with the methods and compositions disclosed herein as embodiments of the present disclosure.

### X. Definitions

[1736] At various places in the present specification, substituents of compounds of the present disclosure are disclosed in groups or in ranges. It is specifically intended that the present disclosure include each and every individual sub-combination of the members of such groups and ranges. The following is a non-limiting list of term definitions.

[1737] Adeno-associated virus: As used herein, the term “adeno-associated virus” or “AAV” refers to members of the dependovirus genus or a variant, e.g., a functional variant, thereof. In some embodiments, the AAV is wildtype, or naturally occurring. In some embodiments, the AAV is recombinant.

[1738] AAV Particle: As used herein, an “AAV particle” refers to a particle or a virion comprising an AAV capsid, e.g., an AAV capsid variant, and a polynucleotide, e.g., a viral genome or a vector genome. In some embodiments, the viral genome of the AAV particle comprises at least one payload region and at least one ITR. In some embodiments, an AAV particle of the disclosure is an AAV particle comprising an AAV capsid polypeptide, e.g., a parent capsid sequence with at least one peptide insert. In some embodiments, the AAV particle is capable of delivering a nucleic acid, e.g., a payload region, encoding a payload to cells, typically, mammalian, e.g., human, cells. In some embodiments, an AAV particle of the present disclosure may be produced recombinantly. In some embodiments, an AAV particle may be derived from any serotype, described herein or known in the art, including combinations of serotypes (e.g., “pseudotyped” AAV) or from various genomes (e.g., single stranded or self-complementary). In some embodiments, the AAV particle may be replication defective and/or targeted. In some embodiments, the AAV particle may comprises a peptide present, e.g., inserted into, the capsid to enhance tropism for a desired target tissue. It is to be understood that reference to the AAV particle of the disclosure also includes pharmaceutical compositions thereof, even if not explicitly recited.

[1739] Administered in combination: As used herein, the term “administered in combination” or “delivered in combination” or “combined administration” refers to exposure of two or more agents (e.g., AAV) administered at the same time or within an interval such that the subject is at some point in time exposed to both agents and/or such that there is an overlap in the effect of each agent on the patient. In some embodiments, at least one dose of one or more agents is administered within about 24 hours, 12 hours, 6 hours, 3 hours, 1 hour, 30 minutes, 15 minutes, 10 minutes, 5 minutes, or 1 minute of at least one dose of one or more other agents. In some embodiments, administration occurs in overlapping dosage regimens. As used herein, the term “dosage regimen” refers to a plurality of doses spaced apart in time. Such doses may occur at regular intervals or may include one or more hiatuses in administration. In some embodiments, the administration of individual doses of one or more compounds and/or compositions of the present disclosure, as described herein, are spaced sufficiently closely together such that a combinatorial (e.g., a synergistic) effect is achieved.

[1740] Amelioration: As used herein, the term “amelioration” or “ameliorating” refers to a lessening of severity of at least one indicator of a condition or disease. For example, in the context of a neurodegenerative disorder, amelioration includes the reduction or stabilization of neuron loss.

[1741] Antisense strand: As used herein, the term “the antisense strand” or “the first strand” or “the guide strand” of a siRNA molecule refers to a strand that is substantially complementary to a section of about 10-50 nucleotides, e.g., about 15-30, 16-25, 18-23 or 19-22 nucleotides of the mRNA of the gene targeted for silencing. The antisense strand or first strand has sequence sufficiently complementary to the desired target mRNA sequence to direct target-specific silencing, e.g., complementarity sufficient to trigger the destruction of the desired target mRNA by the RNAi machinery or process.

[1742] Approximately: As used herein, the term “approximately” or “about,” as applied to one or more values of interest, refers to a value that is similar to a stated reference value. In certain embodiments, the term “approximately” or “about” refers to a range of values that fall within 25%, 20%, 19%, 18%, 17%, 16%, 15%, 14%, 13%, 12%, 11%, 10%, 9%, 8%, 7%, 6%, 5%, 4%, 3%, 2%, 1%, 0.5%, 0.25%, 0.1%, or less in either direction (greater than or less than) of the stated reference value unless otherwise stated or otherwise evident from the context (except where such number would exceed 100% of a possible value).

[1743] Capsid: As used herein, the term “capsid” refers to the exterior, e.g., a protein shell, of a virus particle, e.g., an AAV particle, that is substantially (e.g., >50%, >60%, >70%, >80%, >90%, >95%, >99%, or 100%) protein. In some embodiments, the capsid is an AAV capsid comprising an AAV capsid protein described herein, e.g., a VP1, VP2, and/or VP3 polypeptide. The AAV capsid protein can be a wild-type AAV capsid protein or a variant, e.g., a structural and/or functional variant from a wild-type or a reference capsid protein, referred to herein as an “AAV capsid variant.” In some embodiments, the AAV capsid variant described herein has the ability to enclose, e.g., encapsulate, a viral genome and/or is capable of entry into a cell, e.g., a mammalian cell. In some embodiments, the AAV capsid variant described herein may have modified tropism compared to that of a wild-type AAV capsid, e.g., the corresponding wild-type capsid.

[1744] Encapsulate: As used herein, the term “encapsulate” means to enclose, surround or encase. As an example, a capsid protein, e.g., an AAV capsid variant, often encapsulates a viral genome. In some embodiments, encapsulate within a capsid, e.g., an AAV capsid variant, encompasses 100% coverage by a capsid, as well as less than 100% coverage, e.g., 95%, 90%, 85%, 80%, 70%, 60% or less. For example, gaps or discontinuities may be present in the capsid so long as the viral genome is retained in the capsid, e.g., prior to entry into a cell.

[1745] Central Nervous System or CNS: As used herein, “central nervous system” or “CNS” refers to one of the two major subdivisions of the nervous system, which in vertebrates includes the brain and spinal cord. The central nervous system coordinates the activity of the entire nervous system.

[1746] Cervical Region: As used herein, “cervical region” refers to the region of the spinal cord comprising the cervical vertebrae C1, C2, C3, C4, C5, C6, C7, and C8.

[1747] CNS tissue: As used herein, “CNS tissue” or “CNS tissues” refers to the tissues of the central nervous system, which in vertebrates, include the brain and spinal cord and sub-structures thereof.

[1748] CNS structures: As used herein, “CNS structures” refers to structures of the central nervous system and sub-structures thereof. Non-limiting examples of structures in the spinal cord may include, ventral horn, dorsal horn, white matter, and nervous system pathways or nuclei within. Non-limiting examples of structures in the brain include, forebrain, midbrain, hindbrain, diencephalon, telencephalon, myelencephalon, metencephalon, mesencephalon, prosencephalon, rhombencephalon, cortices, frontal lobe, parietal lobe, temporal lobe, occipital lobe, cerebrum, thalamus, hypothalamus, tectum, tegmentum, cerebellum, pons, medulla, amygdala, hippocampus, basal ganglia, corpus callosum, pituitary gland, putamen, striatum, ventricles and sub-structures thereof.

[1749] CNS Cells: As used herein, “CNS cells” refers to cells of the central nervous system and sub-structures thereof. Non-limiting examples of CNS cells include, neurons and sub-types thereof, glia, microglia, oligodendrocytes, ependymal cells and astrocytes. Non-limiting examples of neurons include sensory neurons, motor neurons, interneurons, unipolar cells, bipolar cells, multipolar cells, pseudounipolar cells, pyramidal cells, basket cells, stellate cells, Purkinje cells, Betz cells, amacrine cells, granule cell, ovoid cell, medium aspiny neurons and large aspiny neurons.

[1750] Complementary: As used herein, the term “complementary” refers to the ability of polynucleotides to form base pairs with one another. Base pairs are typically formed by hydrogen bonds between nucleotide units in antiparallel polynucleotide strands. Complementary polynucleotide strands can form base pair in the Watson-Crick manner (e.g., A to T, A to U, C to G), or in any other manner that allows for the formation of duplexes. As persons skilled in the art are aware, when using RNA as opposed to DNA, uracil rather than thymine is the base that is considered to be complementary to adenosine. However, when a U is denoted in the context of the present disclosure, the ability to substitute a T is implied, unless otherwise stated. Perfect complementarity or 100% complementarity refers to the situation in which each nucleotide unit of one polynucleotide strand can form hydrogen bond with a nucleotide unit of a second polynucleotide strand. Less than perfect complementarity refers to the situation in which some, but not all, nucleotide units of two strands can form hydrogen bond with each other. For example, for two 20-mers, if only two base pairs on each strand can form hydrogen bond with each other, the polynucleotide strands exhibit 10% complementarity. In the same example, if 18 base pairs on each strand can form hydrogen bonds with each other, the polynucleotide strands exhibit 90% complementarity.

[1751] Conservative amino acid substitution: As used herein, a “conservative amino acid substitution” is one in which the amino acid residue is replaced with an amino acid residue having a similar side chain. Families of amino acid residues having similar side chains have been defined in the art. These families include amino acids with basic side chains (e.g., lysine, arginine, histidine), acidic side chains (e.g., aspartic acid, glutamic acid), uncharged polar side chains (e.g., glycine, asparagine, glutamine, serine, threonine, tyrosine, cysteine), nonpolar side chains (e.g., alanine, valine, leucine, isoleucine, proline, phenylalanine, methionine, tryptophan), beta-branched side chains (e.g., threonine, valine, isoleucine) and aromatic side chains (e.g., tyrosine, phenylalanine, tryptophan, histidine).

[1752] Conserved: As used herein, the term “conserved” refers to nucleotides or amino acid residues of polynucleotide or polypeptide sequences, respectively, that are those that occur unaltered in the same position of two or more sequences being compared. Nucleotides or amino acids that are relatively conserved are those that are conserved among more related sequences than nucleotides or amino acids appearing elsewhere in the sequences.

[1753] In some embodiments, two or more sequences are said to be “completely conserved” if they are 100% identical to one another. In some embodiments, two or more sequences are said to be “highly conserved” if they are at least 70% identical, at least 80% identical, at least 90% identical, or at least 95% identical to one another. In some embodiments, two or more sequences are said to be “highly conserved” if they are about 70% identical, about 80% identical, about 90% identical, about 95%, about 98%, or about 99% identical to one another. In some embodiments, two or more sequences are said to be “conserved” if they are at least 30% identical, at least 40% identical, at least 50% identical, at least 60% identical, at least 70% identical, at least 80% identical, at least 90% identical, or at least 95% identical to one another. In some embodiments, two or more sequences are said to be “conserved” if they are about 30% identical, about 40% identical, about 50% identical, about 60% identical, about 70% identical, about 80% identical, about 90% identical, about 95% identical, about 98% identical, or about 99% identical to one another. Conservation of sequence may apply to the entire length of an oligonucleotide or polypeptide or may apply to a portion, region or feature thereof.

[1754] In some embodiments, conserved sequences are not contiguous. Those skilled in the art are able to appreciate how to achieve alignment when gaps in contiguous alignment are present between sequences, and to align corresponding residues not withstanding insertions or deletions present.

[1755] Delivery: As used herein, “delivery” refers to the act or manner of delivering a parvovirus e.g., AAV compound, substance, entity, moiety, cargo or payload to a target. Such target may be a cell, tissue, organ, organism, or system (whether biological or production).

[1756] Delivery Agent: As used herein, “delivery agent” refers to any agent which facilitates, at least in part, the delivery of one or more substances (including, but not limited to a compounds and/or compositions of the present disclosure, e.g., an AAV viral particle) to targeted cells.

[1757] Delivery route: As used herein, the term “delivery route” and the synonymous term “administration route” refers to any of the different methods for providing a therapeutic agent to a subject. Routes of administration are generally classified by the location at which the substance is applied and may also be classified based on where the target of action is. Examples include, but are not limited to: intravenous administration, subcutaneous administration, oral administration, parenteral administration, enteral administration, topical administration, sublingual administration, inhalation administration, and injection administration, or other routes of administration described herein.

[1758] Effective amount: As used herein, the term “effective amount” of an agent is that amount sufficient to effect beneficial or desired results, for example, upon single or multiple dose administration to a subject or a cell, in curing, alleviating, relieving or improving one or more symptoms of a disorder and, as such, an “effective amount” depends upon the context in which it is being applied. For example, in the context of administering an agent that treats amyotrophic lateral sclerosis (ALS) and related disorders, an effective amount of an agent is, for example, an amount sufficient to achieve treatment, as defined herein, of a SOD1-related disorder as compared to the response obtained without administration of the agent.

[1759] Expression: As used herein, “expression” of a nucleic acid sequence refers to one or more of the following events: (1) production of an RNA template from a DNA sequence (e.g., by transcription); (2) processing of an RNA transcript (e.g., by splicing, editing, 5′ cap formation, and/or 3′ end processing); (3) translation of an RNA into a polypeptide or protein; (4) folding of a polypeptide or protein; and/or (5) post-translational modification of a polypeptide or protein.

[1760] Excipient: As used herein, the term “excipient” refers to an inactive substance that serves as the vehicle or medium for an active pharmaceutical agent or other active substance.

[1761] Formulation: As used herein, a “formulation” includes at least a compound and/or composition of the present disclosure (e.g., a vector, AAV particle, etc.) and a delivery agent.

[1762] Fragment: A “fragment,” as used herein, refers to a contiguous portion of a whole. For example, fragments of proteins may comprise polypeptides obtained by digesting full-length protein isolated from cultured cells. In some embodiments, a fragment of a protein includes at least 3, 4, 5, 6, 7, 8, 9, 10, 11, 12, 13, 14, 15, 16, 17, 18, 19, 20, 25, 30, 35, 40, 45, 50, 55, 60, 65, 70, 75, 80, 85, 90, 95, 100, 150, 200, 250 or more amino acids. A fragment may also refer to a truncation (e.g., an N-terminal and/or C-terminal truncation) of a protein or a truncation (e.g., at the 5′ and/or 3′ end) of a nucleic acid. A protein fragment may be obtained by expression of a truncated nucleic acid, such that the nucleic acid encodes a portion of the full-length protein.

[1763] Gene expression: As used herein, the term “gene expression” refers to the process by which a nucleic acid sequence undergoes successful transcription and in most instances translation to produce a protein or peptide. For clarity, when reference is made to measurement of “gene expression”, this should be understood to mean that measurements may be of the nucleic acid product of transcription, e.g., RNA or mRNA or of the amino acid product of translation, e.g., polypeptides or peptides. Methods of measuring the amount or levels of RNA, mRNA, polypeptides and peptides are well known in the art.

[1764] Homology: As used herein, the term “homology” refers to the overall relatedness between polymeric molecules, e.g. between nucleic acid molecules (e.g. DNA molecules and/or RNA molecules) and/or between polypeptide molecules. In some embodiments, polymeric molecules are considered to be “homologous” to one another if their sequences are at least 25%, 30%, 35%, 40%, 45%, 50%, 55%, 60%, 65%, 70%, 75%, 80%, 85%, 90%, 95%, or 99% identical or similar. The term “homologous” necessarily refers to a comparison between at least two sequences (polynucleotide or polypeptide sequences). In accordance with the disclosure, two polynucleotide sequences are considered to be homologous if the polypeptides they encode are at least about 50%, 60%, 70%, 80%, 90%, 95%, or even 99% identical for at least one stretch of at least about 20 amino acids. In some embodiments, homologous polynucleotide sequences are characterized by the ability to encode a stretch of at least 4-5 uniquely specified amino acids. For polynucleotide sequences less than 60 nucleotides in length, homology is typically determined by the ability to encode a stretch of at least 4-5 uniquely specified amino acids. In accordance with the disclosure, two protein sequences are considered to be homologous if the proteins are at least about 50%, 60%, 70%, 80%, or 90% identical for at least one stretch of at least about 20 amino acids. In many embodiments, homologous protein may show a large overall degree of homology and a high degree of homology over at least one short stretch of at least 3, 4, 5, 6, 7, 8, 9, 10, 11, 12, 13, 14, 15, 16, 17, 18, 19, 20, 25, 30, 35, 40, 45, 50, or more amino acids. In many embodiments, homologous proteins share one or more characteristic sequence elements. As used herein, the term “characteristic sequence element” refers to a motif present in related proteins. In some embodiments, the presence of such motifs correlates with a particular activity (such as biological activity).

[1765] Humanized: As used herein, the term “humanized” refers to a non-human sequence of a polynucleotide or a polypeptide which has been altered to increase its similarity to a corresponding human sequence.

[1766] Identity: As used herein, the term “identity” refers to the overall relatedness between polymeric molecules, e.g., between oligonucleotide molecules (e.g. DNA molecules and/or RNA molecules) and/or between polypeptide molecules. Calculation of the percent identity of two polynucleotide sequences, for example, may be performed by aligning the two sequences for optimal comparison purposes (e.g., gaps can be introduced in one or both of a first and a second nucleic acid sequences for optimal alignment and non-identical sequences can be disregarded for comparison purposes). In certain embodiments, the length of a sequence aligned for comparison purposes is at least 30%, at least 40%, at least 50%, at least 60%, at least 70%, at least 80%, at least 90%, at least 95%, or 100% of the length of the reference sequence. The nucleotides at corresponding nucleotide positions are then compared. When a position in the first sequence is occupied by the same nucleotide as the corresponding position in the second sequence, then the molecules are identical at that position. The percent identity between the two sequences is a function of the number of identical positions shared by the sequences, taking into account the number of gaps, and the length of each gap, which needs to be introduced for optimal alignment of the two sequences. The comparison of sequences and determination of percent identity between two sequences can be accomplished using a mathematical algorithm. For example, the percent identity between two nucleotide sequences can be determined using methods such as those described in Computational Molecular Biology, Lesk, A. M., ed., Oxford University Press, New York, 1988; Biocomputing: Informatics and Genome Projects, Smith, D. W., ed., Academic Press, New York, 1993; Sequence Analysis in Molecular Biology, von Heinje, G., Academic Press, 1987; Computer Analysis of Sequence Data, Part I, Griffin, A. M., and Griffin, H. G., eds., Humana Press, New Jersey, 1994; and Sequence Analysis Primer, Gribskov, M. and Devereux, J., eds., M Stockton Press, New York, 1991; each of which is incorporated herein by reference in its entirety. For example, the percent identity between two nucleotide sequences can be determined, for example using the algorithm of Meyers and Miller (CABIOS, 1989, 4:11-17), which has been incorporated into the ALIGN program (version 2.0) using a PAM120 weight residue table, a gap length penalty of 12 and a gap penalty of 4. The percent identity between two nucleotide sequences can, alternatively, be determined using the GAP program in the GCG software package using an NWSgapdna.CMP matrix. Methods commonly employed to determine percent identity between sequences include, but are not limited to those disclosed in Carillo, H., and Lipman, D., SIAM J Applied Math., 48:1073 (1988); incorporated herein by reference in its entirety. Techniques for determining identity are codified in publicly available computer programs. Computer software to determine homology between two sequences include, but are not limited to, GCG program package, Devereux, J., et al., Nucleic Acids Research, 12(1), 387 (1984)), BLASTP, BLASTN, and FASTA Altschul, S. F. et al., J. Molecular Biol., 215, 403 (1990)).

[1767] Inhibit expression of a gene: As used herein, the phrase “inhibit expression of a gene” means to cause a reduction in the amount of an expression product of the gene. The expression product can be a RNA molecule transcribed from the gene (e.g., an mRNA) or a polypeptide translated from an mRNA transcribed from the gene. Typically, a reduction in the level of an mRNA results in a reduction in the level of a polypeptide translated therefrom. The level of expression may be determined using standard techniques for measuring mRNA or protein.

[1768] Isolated: As used herein, the term “isolated” refers to a substance or entity that is altered or removed from the natural state, e.g., altered or removed from at least some of component with which it is associated in the natural state. For example, a nucleic acid or a peptide naturally present in a living animal is not “isolated,” but the same nucleic acid or peptide partially or completely separated from the coexisting materials of its natural state is “isolated.” An isolated nucleic acid or protein can exist in substantially purified form, or can exist in a non-native environment such as, for example, a host cell. Such polynucleotides could be part of a vector and/or such polynucleotides or polypeptides could be part of a composition, and still be isolated in that such vector or composition is not part of the environment in which it is found in nature. In some embodiments, an isolated nucleic acid is recombinant, e.g., incorporated into a vector.

[1769] Lumbar Region: As used herein, the term “lumbar region” refers to the region of the spinal cord comprising the lumbar vertebrae L1, L2, L3, L4, and L5.

[1770] miR binding site series: As used herein, the “miR binding site series” or the “miR binding site” includes an RNA sequence on the RNA transcript produced by transcribing the AAV viral genome. The “miR binding site series” or the “miR binding site” also includes the DNA sequence corresponding to the RNA sequence, in that they differ only by the T in DNA and the U in RNA. The reverse complement of such DNA is the coding sequence for the RNA sequence. That is, in some embodiments, in an expression cassette containing a DNA positive strand, the miR binding site sequence is the reverse complement of the miRNA to which it binds.

[1771] Modified: As used herein, the term “modified” refers to a changed state or structure of a molecule or entity as compared with a parent or reference molecule or entity. Molecules may be modified in many ways including chemically, structurally, and functionally. In some embodiments, compounds and/or compositions of the present disclosure are modified by the introduction of non-natural amino acids, or non-natural nucleotides.

[1772] Mutation: As used herein, the term “mutation” refers to a change and/or alteration. In some embodiments, mutations may be changes and/or alterations to proteins (including peptides and polypeptides) and/or nucleic acids (including polynucleic acids). In some embodiments, mutations comprise changes and/or alterations to a protein and/or nucleic acid sequence. Such changes and/or alterations may comprise the addition, substitution and or deletion of one or more amino acids (in the case of proteins and/or peptides) and/or nucleotides (in the case of nucleic acids and or polynucleic acids). In embodiments wherein mutations comprise the addition and/or substitution of amino acids and/or nucleotides, such additions and/or substitutions may comprise 1 or more amino acid and/or nucleotide residues and may include modified amino acids and/or nucleotides. One or more mutations may result in a “mutant,” “derivative,” or “variant,” e.g., of a nucleic acid sequence or polypeptide or protein sequence.

[1773] Variant: The term “variant” refers to a polypeptide or polynucleotide that has an amino acid or a nucleotide sequence that is substantially identical, e.g., having at least 70%, 75%, 80%, 85%, 90%, 95% or 99% sequence identity to a reference sequence. In some embodiments, the variant is a functional variant.

[1774] Functional Variant: The term “functional variant” refers to a polypeptide variant or a polynucleotide variant that has at least one activity of the reference sequence.

[1775] Insertional Variant: “Insertional variants” when referring to polypeptides are those with one or more amino acids inserted, e.g., immediately adjacent or subsequent, to a position in an amino acid sequence. “Immediately adjacent” or “immediately subsequent” to an amino acid means connected to either the alpha-carboxy or alpha-amino functional group of the amino acid.

[1776] Nucleic acid: As used herein, the terms “nucleic acid,” “polynucleotide,” and “oligonucleotide” refer to any nucleic acid polymers composed of either polydeoxyribonucleotides (containing 2-deoxy-D-ribose), or polyribonucleotides (containing D-ribose), or any other type of polynucleotide that is an N glycoside of a purine or pyrimidine base, or modified purine or pyrimidine bases. There is no intended distinction in length between the term “nucleic acid,” “polynucleotide,” and “oligonucleotide,” and these terms will be used interchangeably. These terms refer only to the primary structure of the molecule. Thus, these terms include double- and single-stranded DNA, as well as double- and single-stranded RNA.

[1777] Neurodegeneration: As used herein, the term “neurodegeneration” refers to a pathologic state which results in neural cell death. A large number of neurological disorders share neurodegeneration as a common pathological state. For example, Alzheimer's disease, Parkinson's disease, Huntington's disease, and amyotrophic lateral sclerosis (ALS) all cause chronic neurodegeneration, which is characterized by a slow, progressive neural cell death over a period of several years, whereas acute neurodegeneration is characterized by a sudden onset of neural cell death as a result of ischemia, such as stroke, or trauma, such as traumatic brain injury, or as a result of axonal transection by demyelination or trauma caused, for example, by spinal cord injury or multiple sclerosis. In some neurological disorders, mainly one type of neuron cells is degenerative, for example, motor neuron degeneration in ALS.

[1778] Operably linked. As used herein, the phrase “operably linked” refers to a functional connection between two or more molecules, constructs, transcripts, entities, moieties or the like.

[1779] Particle: As used herein, a “particle” is a virus comprised of at least two components, a protein capsid and a polynucleotide sequence enclosed within the capsid.

[1780] Payload: As used herein, “payload” or “payload region” refers to one or more polynucleotides or polynucleotide regions encoded by or within a viral genome or an expression product of such polynucleotide or polynucleotide region, e.g., a transgene, a polynucleotide encoding a polypeptide.

[1781] Payload construct: As used herein, “payload construct” is one or more polynucleotide regions encoding or comprising a payload that is flanked on one or both sides by an inverted terminal repeat (ITR) sequence. The payload construct is a template that is replicated in a viral production cell to produce a viral genome.

[1782] Payload construct vector: As used herein, “payload construct vector” is a vector encoding or comprising a payload construct, and regulatory regions for replication and expression in bacterial cells. The payload construct vector may also comprise a component for viral expression in a viral replication cell.

[1783] Pharmaceutically acceptable: The phrase “pharmaceutically acceptable” is employed herein to refer to those compounds, materials, compositions, and/or dosage forms which are suitable for use in contact with the tissues of human beings and animals.

[1784] Pharmaceutically acceptable excipients: As used herein, the term “pharmaceutically acceptable excipient,” as used herein, refers to any ingredient other than active agents (e.g., as described herein) present in pharmaceutical compositions t that can function as vehicles for suspending and/or dissolving active agents.

[1785] Pharmaceutically acceptable salts: Pharmaceutically acceptable salts of the compounds described herein are forms of the disclosed compounds wherein the acid or base moiety is in its salt form (e.g., as generated by reacting a free base group with a suitable organic acid). Examples of pharmaceutically acceptable salts include, but are not limited to, mineral or organic acid salts of basic residues such as amines; alkali or organic salts of acidic residues such as carboxylic acids; and the like. Lists of suitable salts are found in Remington's Pharmaceutical Sciences, 17^{th} ed., Mack Publishing Company, Easton, Pa., 1985, p. 1418, Pharmaceutical Salts: Properties, Selection, and Use, P. H. Stahl and C. G. Wermuth (eds.), Wiley-VCH, 2008, and Berge et al., Journal of Pharmaceutical Science, 66, 1-19 (1977), the contents of each of which are incorporated herein by reference in their entirety.

[1786] Pharmaceutical Composition: As used herein, the term “pharmaceutical composition” or pharmaceutically acceptable composition” comprises AAV polynucleotides, AAV genomes, or AAV particle and one or more pharmaceutically acceptable excipients, solvents, adjuvants, and/or the like.

[1787] Polypeptide: As used herein, “polypeptide” means a polymer of amino acid residues (natural or unnatural) linked together most often by peptide bonds. The term, as used herein, refers to proteins, polypeptides, and peptides of any size, structure, or function. In some instances, the polypeptide encoded is smaller than about 50 amino acids and the polypeptide is then termed a peptide. If the polypeptide is a peptide, it will be at least about 2, 3, 4, or at least 5 amino acid residues long. Thus, polypeptides include gene products, naturally occurring polypeptides, synthetic polypeptides, homologs, orthologs, paralogs, fragments and other equivalents, variants, and analogs of the foregoing. A polypeptide may be a single molecule or may be a multi-molecular complex such as a dimer, trimer or tetramer. They may also comprise single chain or multichain polypeptides and may be associated or linked. The term polypeptide may also apply to amino acid polymers in which one or more amino acid residues are an artificial chemical analogue of a corresponding naturally occurring amino acid.

[1788] Polypeptide variant: The term “polypeptide variant” refers to molecules which differ in their amino acid sequence from a native or reference sequence. The amino acid sequence variants may possess substitutions, deletions, and/or insertions at certain positions within the amino acid sequence, as compared to a native or reference sequence. In some embodiments, a variant comprises a sequence having at least about 50%, at least about 80%, or at least about 90%, identical (homologous) to a native or a reference sequence.

[1789] Peptide: As used herein, “peptide” is less than or equal to 50 amino acids long, e.g., about 5, 10, 15, 20, 25, 30, 35, 40, 45, or 50 amino acids long.

[1790] Preventing: As used herein, the term “preventing” refers to partially or completely delaying onset of an infection, disease, disorder and/or condition; partially or completely delaying onset of one or more symptoms, features, or clinical manifestations of a particular infection, disease, disorder, and/or condition; partially or completely delaying onset of one or more symptoms, features, or manifestations of a particular infection, disease, disorder, and/or condition; partially or completely delaying progression from an infection, a particular disease, disorder and/or condition; and/or decreasing the risk of developing pathology associated with the infection, the disease, disorder, and/or condition.

[1791] Promoter: As used herein, the term “promoter” refers to a nucleic acid site to which a polymerase enzyme will bind to initiate transcription (DNA to RNA) or reverse transcription (RNA to DNA).

[1792] Purified: As used herein, the term “purify” means to make substantially pure or clear from one or more unwanted components, material defilement, admixture or imperfection. “Purified” refers to the state of being pure. “Purification” refers to the process of making pure. As used herein, a substance is “pure” if it is substantially free of (substantially isolated from) one or more components, e.g., one or more components found in a native context.

[1793] Region: As used herein, the term “region” refers to a zone or general area. In some embodiments, when referring to a protein or protein module, a region may comprise a linear sequence of amino acids along the protein or protein module or may comprise a three dimensional area, an epitope and/or a cluster of epitopes. In some embodiments, regions comprise terminal regions. As used herein, the term “terminal region” refers to regions located at the ends or termini of a given agent. When referring to proteins, terminal regions may comprise N- and/or C-termini. N-termini refer to the end of a protein comprising an amino acid with a free amino group. C-termini refer to the end of a protein comprising an amino acid with a free carboxyl group. N- and/or C-terminal regions may comprise the N- and/or C-termini as well as surrounding amino acids. In some embodiments, N- and/or C-terminal regions comprise from about 3 amino acids to about 30 amino acids, from about 5 amino acids to about 40 amino acids, from about 10 amino acids to about 50 amino acids, from about 20 amino acids to about 100 amino acids and/or at least 100 amino acids. In some embodiments, N-terminal regions may comprise any length of amino acids that includes the N-terminus, but does not include the C-terminus. In some embodiments, C-terminal regions may comprise any length of amino acids, which include the C-terminus, but do not comprise the N-terminus.

[1794] In some embodiments, when referring to a polynucleotide, a region may comprise a linear sequence of nucleic acids along the polynucleotide or may comprise a three dimensional area, secondary structure, or tertiary structure. In some embodiments, regions comprise terminal regions. As used herein, the term “terminal region” refers to regions located at the ends or termini of a given agent. When referring to polynucleotides, terminal regions may comprise 5′ and 3′ termini. 5′ termini refer to the end of a polynucleotide comprising a nucleic acid with a free phosphate group. 3′ termini refer to the end of a polynucleotide comprising a nucleic acid with a free hydroxyl group. 5′ and 3′ regions may there for comprise the 5′ and 3′ termini as well as surrounding nucleic acids. In some embodiments, 5′ and 3′ terminal regions comprise from about 9 nucleic acids to about 90 nucleic acids, from about 15 nucleic acids to about 120 nucleic acids, from about 30 nucleic acids to about 150 nucleic acids, from about 60 nucleic acids to about 300 nucleic acids and/or at least 300 nucleic acids. In some embodiments, 5′ regions may comprise any length of nucleic acids that includes the 5′ terminus, but does not include the 3′ terminus. In some embodiments, 3′ regions may comprise any length of nucleic acids, which include the 3′ terminus, but does not comprise the 5′ terminus.

[1795] RNA or RNA molecule: As used herein, the term “RNA” or “RNA molecule” or “ribonucleic acid molecule” refers to a polymer of ribonucleotides; the term “DNA” or “DNA molecule” or “deoxyribonucleic acid molecule” refers to a polymer of deoxyribonucleotides. DNA and RNA can be synthesized naturally, e.g., by DNA replication and transcription of DNA, respectively; or be chemically synthesized. DNA and RNA can be single-stranded (i.e., ssRNA or ssDNA, respectively) or multi-stranded (e.g., double stranded, i.e., dsRNA and dsDNA, respectively). The term “mRNA” or “messenger RNA”, as used herein, refers to a single stranded RNA that encodes the amino acid sequence of one or more polypeptide chains.

[1796] RNA agent: As used herein, the term “RNA agent,” refers to an agent that contains RNA as that term is defined herein, and which mediates the targeted cleavage of an RNA transcript, e.g., via an RNA-induced silencing complex (RISC) pathway. In some embodiments, the RNA agent is a single-stranded antisense RNA molecule, a single-stranded siRNA, or a double-stranded RNA (e.g., a siRNA duplex), e.g., as described herein.

[1797] RNAi: As used herein, the term “RNA interfering” or “RNAi” refers to a sequence specific regulatory mechanism mediated by RNA molecules which results in the inhibition or interfering or “silencing” of the expression of a corresponding protein-coding gene. RNAi has been observed in many types of organisms, including plants, animals and fungi. RNAi occurs in cells naturally to remove foreign RNAs (e.g., viral RNAs). Natural RNAi proceeds via fragments cleaved from free dsRNA which direct the degradative mechanism to other similar RNA sequences. RNAi is controlled by the RNA-induced silencing complex (RISC) and is initiated by short/small dsRNA molecules in cell cytoplasm, where they interact with the catalytic RISC component argonaute. The dsRNA molecules can be introduced into cells exogenously. Exogenous dsRNA initiates RNAi by activating the ribonuclease protein Dicer, which binds and cleaves dsRNAs to produce double-stranded fragments of 21-25 base pairs with a few unpaired overhang bases on each end. These short double stranded fragments are called small interfering RNAs (siRNAs).

[1798] Sample: As used herein, the term “sample” refers to an aliquot or portion taken from a source and/or provided for analysis or processing. In some embodiments, a sample is from a biological source such as a tissue, cell or component part (e.g. a body fluid, including but not limited to blood, mucus, lymphatic fluid, synovial fluid, cerebrospinal fluid, saliva, amniotic fluid, amniotic cord blood, urine, vaginal fluid and semen).

[1799] Sense strand: As used herein, the term “the sense strand” or “the second strand” or “the passenger strand” of a siRNA molecule refers to a strand that is complementary to the antisense strand or first strand. The antisense and sense strands of a siRNA molecule are hybridized to form a duplex structure. As used herein, a “siRNA duplex” includes a siRNA strand having sufficient complementarity to a section of about 10-50 nucleotides of the mRNA of the gene targeted for silencing and a siRNA strand having sufficient complementarity to form a duplex with the siRNA strand. According to the present disclosure, recombinant AAV genome may encode a sense and/or antisense strand.

[1800] Serotype: As used herein, the term “serotype” refers to distinct variations in a capsid of an AAV based on surface antigens which allow epidemiologic classifications of the AAVs at the sub-species level.

[1801] Signal Sequences: As used herein, the phrase “signal sequences” refers to a sequence which can direct the transport or localization.

[1802] Similarity: As used herein, the term “similarity” refers to the overall relatedness between polymeric molecules, e.g. between polynucleotide molecules (e.g. DNA molecules and/or RNA molecules) and/or between polypeptide molecules. Calculation of percent similarity of polymeric molecules to one another can be performed in the same manner as a calculation of percent identity, except that calculation of percent similarity takes into account conservative substitutions as is understood in the art.

[1803] siRNA: As used herein, the term “small/short interfering RNA” or “siRNA” refers to an RNA molecule (or RNA analog) comprising between about 5-60 nucleotides (or nucleotide analogs) which is capable of directing or mediating RNAi. Preferably, a siRNA molecule comprises between about 15-30 nucleotides or nucleotide analogs, more preferably between about 16-25 nucleotides (or nucleotide analogs), even more preferably between about 18-23 nucleotides (or nucleotide analogs), and even more preferably between about 19-22 nucleotides (or nucleotide analogs) (e.g., 19, 20, 21 or 22 nucleotides or nucleotide analogs). The term “short” siRNA refers to a siRNA comprising 5-23 nucleotides, preferably 21 nucleotides (or nucleotide analogs), for example, 19, 20, 21 or 22 nucleotides. The term “long” siRNA refers to a siRNA comprising 24-60 nucleotides, preferably about 24-25 nucleotides, for example, 23, 24, 25 or 26 nucleotides. Short siRNAs may, in some instances, include fewer than 19 nucleotides, e.g., 16, 17 or 18 nucleotides, or as few as 5 nucleotides, provided that the shorter siRNA retains the ability to mediate RNAi. Likewise, long siRNAs may, in some instances, include more than 26 nucleotides, e.g., 27, 28, 29, 30, 35, 40, 45, 50, 55, or even 60 nucleotides, provided that the longer siRNA retains the ability to mediate RNAi or translational repression absent further processing, e.g., enzymatic processing, to a short siRNA. siRNAs can be single stranded RNA molecules (ss-siRNAs) or double stranded RNA molecules (ds-siRNAs) comprising a sense strand and an antisense strand which hybridized to form a duplex structure called siRNA duplex. According to the present disclosure, recombinant AAV genome may encode one or more RNAi molecules such as an siRNA, shRNA, microRNA or precursor thereof.

[1804] Spacer: As used herein, a “spacer” is generally any selected nucleic acid sequence of, e.g., 1, 2, 3, 4, 5, 6, 7, 8, 9, or 10 nucleotides in length, which is located between two or more consecutive miR binding site sequences.

[1805] Subject: As used herein, the term “subject” or “patient” refers to any organism to which a composition in accordance with the disclosure may be administered, e.g., for experimental, diagnostic, prophylactic, and/or therapeutic purposes. Similarly, “subject” or “patient” refers to an organism who may seek, who may require, who is receiving, or who will receive treatment or who is under care by a trained professional for a particular disease or condition. Typical subjects include animals (e.g., mammals such as mice, rats, rabbits, non-human primates, and humans).

[1806] Substantially: As used herein, the term “substantially” refers to the qualitative condition of exhibiting total or near-total extent or degree of a characteristic or property of interest. One of ordinary skill in the biological arts will understand that biological and chemical phenomena rarely, if ever, go to completion and/or proceed to completeness or achieve or avoid an absolute result. The term “substantially” is therefore used herein to capture the potential lack of completeness inherent in many biological and chemical phenomena.

[1807] Suffering from: An individual who is “suffering from” a disease, disorder, and/or condition has been diagnosed with or displays one or more symptoms of a disease, disorder, and/or condition.

[1808] Susceptible to: An individual who is “susceptible to” a disease, disorder, and/or condition has not been diagnosed with and/or may not exhibit symptoms of the disease, disorder, and/or condition but harbors a propensity to develop a disease or its symptoms. In some embodiments, an individual who is susceptible to a disease, disorder, and/or condition (for example, cancer) may be characterized by one or more of the following: (1) a genetic mutation associated with development of the disease, disorder, and/or condition; (2) a genetic polymorphism associated with development of the disease, disorder, and/or condition; (3) increased and/or decreased expression and/or activity of a protein and/or nucleic acid associated with the disease, disorder, and/or condition; (4) habits and/or lifestyles associated with development of the disease, disorder, and/or condition; (5) a family history of the disease, disorder, and/or condition; and (6) exposure to and/or infection with a microbe associated with development of the disease, disorder, and/or condition. In some embodiments, an individual who is susceptible to a disease, disorder, and/or condition will develop the disease, disorder, and/or condition. In some embodiments, an individual who is susceptible to a disease, disorder, and/or condition will not develop the disease, disorder, and/or condition.

[1809] Synthetic: The term “synthetic” means produced, prepared, and/or manufactured by the hand of man. Synthesis of polynucleotides or polypeptides or other molecules of the present disclosure may be chemical or enzymatic.

[1810] Targeting: As used herein, “targeting” means the process of design and selection of nucleic acid sequence that will hybridize to a target nucleic acid and induce a desired effect.

[1811] Targeted Cells: As used herein, “target cells” or “targeted cells” refers to any one or more cells of interest. The cells may be found in vitro, in vivo, in situ or in the tissue or organ of an organism. The organism may be an animal, a mammal, a human and/or a patient. The target cells may be CNS cells or cells in CNS tissue.

[1812] Therapeutic Agent: The term “therapeutic agent” refers to any agent that, when administered to a subject has a therapeutic, diagnostic, and/or prophylactic effect and/or elicits a desired biological and/or pharmacological effect.

[1813] Therapeutically effective amount: As used herein, the term “therapeutically effective amount” means an amount of an agent to be delivered (e.g., nucleic acid, drug, therapeutic agent, diagnostic agent, prophylactic agent, etc.) that is sufficient, when administered to a subject suffering from or susceptible to an infection, disease, disorder, and/or condition, to treat, improve symptoms of, diagnose, prevent, and/or delay the onset of the infection, disease, disorder, and/or condition. In some embodiments, a therapeutically effective amount is provided in a single dose. In some embodiments, a therapeutically effective amount is administered in a dosage regimen comprising a plurality of doses. Those skilled in the art will appreciate that in some embodiments, a unit dosage form may be considered to comprise a therapeutically effective amount of a particular agent or entity if it comprises an amount that is effective when administered as part of such a dosage regimen.

[1814] Thoracic Region: As used herein, a “thoracic region” refers to a region of the spinal cord comprising the thoracic vertebrae T1, T2, T3, T4, T5, T6, T7, T8, T9, T10, T11, and T12.

[1815] Treating: As used herein, the term “treating” refers to partially or completely alleviating, ameliorating, improving, relieving, reversing, delaying onset of, inhibiting progression of, reducing severity of, and/or reducing incidence of one or more symptoms or features of a particular infection, disease, disorder, and/or condition. Treatment may be administered to a subject who does not exhibit signs of a disease, disorder, and/or condition and/or to a subject who exhibits only early signs of a disease, disorder, and/or condition for the purpose of decreasing the risk of developing pathology associated with the disease, disorder, and/or condition.

[1816] Unmodified: As used herein, “unmodified” refers to any substance, compound or molecule prior to being changed in any way. Unmodified may, but does not always, refer to the wild-type or native form of a biomolecule or entity. Molecules or entities may undergo a series of modifications whereby each modified product may serve as the “unmodified” starting molecule or entity for a subsequent modification.

[1817] Vector: As used herein, a “vector” is any molecule or moiety which transports, transduces or otherwise acts as a carrier of a heterologous molecule. Vectors of the present disclosure may be produced recombinantly and may be based on and/or may comprise adeno-associated virus (AAV) parent or reference sequence(s). Such parent or reference AAV sequences may serve as an original, second, third or subsequent sequence for engineering vectors.

[1818] Viral construct vector: As used herein, a “viral construct vector” is a vector which comprises one or more polynucleotide regions encoding or comprising Rep and or Cap protein. A viral construct vector may also comprise one or more polynucleotide region encoding or comprising components for viral expression in a viral replication cell.

[1819] Viral genome: As used herein, a “viral genome” or “vector genome” is a polynucleotide comprising at least one inverted terminal repeat (ITR) and at least one encoded payload. A viral genome encodes at least one copy of the payload.

[1820] The present disclosure is further illustrated by the following non-limiting examples.

### EXAMPLES

### Example 1. SOD1 Targeting Polynucleotide Design (siRNA)

[1821] siRNA design is carried out to identify siRNAs targeting human SOD1 gene. The design uses the SOD1 transcripts from human (GenBank access No. NM_000454.4 (SEQ ID NO: 110)), cynomolgus (GenBank access No. NM_001285406.1 (SEQ ID NO: 111)), rhesus SOD1 transcript (GenBank access No. NM_001032804.1 (SEQ ID NO: 111)), and Sus scrofa (GenBank access No. NM_001190422.1 (SEQ ID NO: 112)), respectively (Table 19). The siRNA duplexes are designed with 100% identity to the human SOD1 transcript for positions 2-18 of the antisense strand, and partial or 100% identity to the non-human SOD1 transcript for positions 2-18 of the antisense strand. In all siRNA duplexes, position 1 of the antisense strand is engineered to a U and position 19 of the sense strand is engineered to a C, in order to unpair the duplex at this position.

TABLE 19
SOD1 gene sequences

| SOD1 | Access | SEQ ID | |
|---|---|---|---|
| transcripts | No. | NO. | Sequence |
| Human (Homo | NM_ | 110 | GTTTGGGGCCAGAGTGGGCGAGGCGCGGAGGTCTGGCCTATAAAGT |
| sapiens) SOD1 | 000454.4 | | AGTCGCGGAGACGGGGTGCTGGTTTGCGTCGTAGTCTCCTGCAGCG |
| cDNA (981 bp) | | | TCTGGGGTTTCCGTTGCAGTCCTCGGAACCAGGACCTCGGCGTGGC |
| | | | CTAGCGAGTTATGGCGACGAAGGCCGTGTGCGTGCTGAAGGGCGAC |
| | | | GGCCCAGTGCAGGGCATCATCAATTTCGAGCAGAAGGAAAGTAATG |
| | | | GACCAGTGAAGGTGTGGGGAAGCATTAAAGGACTGACTGAAGGCCT |
| | | | GCATGGATTCCATGTTCATGAGTTTGGAGATAATACAGCAGGCTGT |
| | | | ACCAGTGCAGGTCCTCACTTTAATCCTCTATCCAGAAAACACGGTG |
| | | | GGCCAAAGGATGAAGAGAGGCATGTTGGAGACTTGGGCAATGTGAC |
| | | | TGCTGACAAAGATGGTGTGGCCGATGTGTCTATTGAAGATTCTGTG |
| | | | ATCTCACTCTCAGGAGACCATTGCATCATTGGCCGCACACTGGTGG |
| | | | TCCATGAAAAAGCAGATGACTTGGGCAAAGGTGGAAATGAAGAAAG |
| | | | TACAAAGACAGGAAACGCTGGAAGTCGTTTGGCTTGTGGTGTAATT |
| | | | GGGATCGCCCAATAAACATTCCCTTGGATGTAGTCTGAGGCCCCTT |
| | | | AACTCATCTGTTATCCTGCTAGCTGTAGAAATGTATCCTGATAAAC |
| | | | ATTAAACACTGTAATCTTAAAAGTGTAATTGTGTGACTTTTTCAGA |
| | | | GTTGCTTTAAAGTACCTGTAGTGAGAAACTGATTTATGATCACTTG |
| | | | GAAGATTTGTATAGTTTTATAAAACTCAGTTAAAATGTCTGTTTCA |
| | | | ATGACCTGTATTTTGCCAGACTTAAATCACAGATGGGTATTAAACT |
| | | | TGTCAGAATTTCTTTGTCATTCAAGCCTGTGAATAAAAACCCTGTA |
| | | | TGGCACTTATTATGAGGCTATTAAAAGAATCCAAATTCAAACTAAA |
| | | | AAAAAAAAAAAAAAA |
| Cynomolgus | NM_ | 111 | ATGGCGATGAAGGCCGTGTGCGTGTTGAAGGGCGACAGCCCAGTGC |
| (Macaca | 001285406.1 | | AGGGCACCATCAATTTCGAGCAGAAGGAAAGTAATGGACCAGTGAA |
| fascicularis) | | | GGTGTGGGGAAGCATTACAGGATTGACTGAAGGCCTGCATGGATTC |
| SOD1 cDNA | | | CATGTTCATCAGTTTGGAGATAATACACAAGGCTGTACCAGTGCAG |
| (465 bp) | | | GTCCTCACTTTAATCCTCTATCCAGACAACACGGTGGGCCAAAGGA |
| | | | TGAAGAGAGGCATGTTGGAGACCTGGGCAATGTGACTGCTGGCAAA |
| | | | GATGGTGTGGCCAAGGTGTCTTTCGAAGATTCTGTGATCTCGCTCT |
| | | | CAGGAGACCATTCCATCATTGGCCGCACATTGGTGGTCCATGAAAA |
| | | | AGCAGATGACTTGGGCAAAGGTGGAAATGAAGAAAGTAAAAAGACA |
| | | | GGAAACGCTGGAGGTCGTCTGGCTTGTGGTGTAATTGGGATCGCCC |
| | | | AATAA |
| rhesus (Macaca | NM_ | 111 | ATGGCGATGAAGGCCGTGTGCGTGTTGAAGGGCGACAGCCCAGTGC |
| mulatta) SOD1 | 001032804.1 | | AGGGCACCATCAATTTCGAGCAGAAGGAAAGTAATGGACCAGTGAA |
| cDNA (465 bp) | | | GGTGTGGGGAAGCATTACAGGATTGACTGAAGGCCTGCATGGATTC |
| | | | CATGTTCATCAGTTTGGAGATAATACACAAGGCTGTACCAGTGCAG |
| | | | GTCCTCACTTTAATCCTCTATCCAGACAACACGGTGGGCCAAAGGA |
| | | | TGAAGAGAGGCATGTTGGAGACCTGGGCAATGTGACTGCTGGCAAA |
| | | | GATGGTGTGGCCAAGGTGTCTTTCGAAGATTCTGTGATCTCGCTCT |
| | | | CAGGAGACCATTCCATCATTGGCCGCACATTGGTGGTCCATGAAAA |
| | | | AGCAGATGACTTGGGCAAAGGTGGAAATGAAGAAAGTAAAAAGACA |
| | | | GGAAACGCTGGAGGTCGTCTGGCTTGTGGTGTAATTGGGATCGCCC |
| | | | AATAA |
| Pig (Sus scrofa) | NM_ | 112 | CGTCGGCGTGTACTGCGGCCTCTCCCGCTGCTTCTGGTACCCTCCC |
| SOD1 cDNA | 001190422.1 | | AGCCCGGACCGGAGCGCGCCCCCGCGAGTCATGGCGACGAAGGCCG |
| (658 bp) | | | TGTGTGTGCTGAAGGGCGACGGCCCGGTGCAGGGCACCATCTACTT |
| | | | CGAGCTGAAGGGAGAGAAGACAGTGTTAGTAACGGGAACCATTAAA |
| | | | GGACTGGCTGAAGGTGATCATGGATTCCATGTCCATCAGTTTGGAG |
| | | | ATAATACACAAGGCTGTACCAGTGCAGGTCCTCACTTCAATCCTGA |
| | | | ATCCAAAAAACATGGTGGGCCAAAGGATCAAGAGAGGCACGTTGGA |
| | | | GACCTGGGCAATGTGACTGCTGGCAAAGATGGTGTGGCCACTGTGT |
| | | | ACATCGAAGATTCTGTGATCGCCCTCTCGGGAGACCATTCCATCAT |
| | | | TGGCCGCACAATGGTGGTCCATGAAAAACCAGATGACTTGGGCAGA |
| | | | GGTGGAAATGAAGAAAGTACAAAGACGGGAAATGCTGGAAGTCGTT |
| | | | TGGCCTGTGGTGTAATTGGGATCACCCAGTAAACATTCCCTCATGC |
| | | | CATGGTCTGAATGCCAGTAACTCATCTGTTATCTTGCTAGTTGTAG |
| | | | TTGTAGAAATTTAACTTGATAAACATTAAACACTGTAACCTTAAAA |
| | | | AAAAAAAAAAAAAA |

### Example 2. NHP High-Throughput Screen of TRACER AAV Libraries

[1822] A TRACER based method as described in WO2020072683, the contents of which are herein incorporated by reference in their entirety, was adapted for use in non-human primates (NHP), as described in WO 2021/202651 and PCT/US2021/025061, the contents of which are herein incorporated by reference in their entirety. An orthogonal evolution approach was combined with a high throughput screening by NGS in NHP as described in WO 2021/202651 and PCT/US2021/025061, the contents of which are herein incorporated by reference in their entirety. Briefly, AAV9/AAV5 starting libraries, driven by synapsin or GFAP promoters were administered to non-human primate (NHP) intravenously for in vivo AAV selection (biopanning), performed iteratively. All libraries were injected intravenously at a dose of 1e14VG per animal (approximately 3e13 VG/kg). Orthogonally, biopanning was conducted in hBMVEC cells using the same starting libraries. In the second round of biopanning in NHP, only libraries driven by the synapsin promoter were used. After a period, (e.g., 1 month) RNA was extracted from nervous tissue, e.g., brain and spinal cord. Following RNA recovery and RT-PCR amplification, a systematic NGS enrichment analysis was performed, and the peptides shown in Table 2 and 20 identified. Capsid enrichment ratio, including calculating the ratio of, e.g., P2/P1 reads and comparison to a benchmark (e.g., AAV9) was evaluated.

[1823] Candidate library enrichment data in P3 NHP brain for the peptides identified, over benchmark AAV9, are shown in Table 20. Data are provided as fold enrichment. Fifty-one variants showed greater than 10-fold enrichment over AAV9. Variants with 0.0 enrichment over AAV9 are not included in Table 20.

TABLE 20
NHP NGS AAV9 Enrichment

| | Fold | | Fold |
|---|---|---|---|
| Peptide | enrichment | Peptide | enrichment |
| Sequence | over AAV9 | Sequence | over AAV9 |
| PLNGAVHLYA | 473.7 | AQAGEQSTRL | 16.1 |
| AQARDSPKGW | 214 | AQASNDVGRA | 15.4 |
| LTNGAVRDRP | 134.4 | AQATFTASEY | 15.3 |
| VQAFTHDSRG | 88.6 | AKAHAGTIYS | 14.9 |
| AQAYSTDVRM | 84.8 | AQARTIDQCC | 14.8 |
| AQAYSTDVRI | 83.8 | AQEYNSNPKA | 14.5 |
| AQAFTAAERM | 74.9 | AQVVDNSTHA | 14.5 |
| AQTHLQIGVA | 54.6 | AQATLSVPLK | 14.4 |
| AQSNAVLSLA | 51.6 | AQIVMNSLKA | 12.5 |
| AQAYSTDERM | 41.4 | AQATMSQTMA | 12.5 |
| AQAYSTDVRL | 31.7 | AQALTQDERW | 12 |
| AQATVSTLRM | 31.5 | AQAQLSTLRP | 11.6 |
| AQAYSTDERK | 31.2 | AQVVMGISVA | 11.4 |
| AQAYSTDMRM | 30.4 | AQAYTTDVRM | 11.4 |
| VVNGAVLHVA | 29.8 | AQHIDSMRPP | 11.3 |
| AQAYSTDVTM | 29.7 | AQASTGTLRL | 11.1 |
| AQAHLQIGVA | 23 | AQHRALDYYA | 11 |
| FLDPAVSSKA | 22.6 | AQARESPRGL | 10.9 |
| AQAYVSTLRM | 21.9 | AQALLAGTRV | 10.7 |
| AQAQTGPPLK | 20.1 | TKIQAVPWNA | 10.7 |
| EQASRLPTPG | 20 | AQASLSSTRP | 10.6 |
| AQASVSTMRM | 19.7 | AQAMGSRSDQ | 10.4 |
| TDYSAVRLGA | 18 | AQAAQGTYRG | 10.3 |
| TQAYSTDVRM | 17.9 | SQENAVFSKA | 10.3 |
| AQALPSNERL | 17.4 | AQAYGLPKGP | 8.4 |
| AQAYSTDVRT | 16.4 | GGTLAVVSLA | 6.9 |
| AQSSLPEMVA | 16.2 | AQAYVSSVKM | 5.2 |

[1824] A subset of the peptide variants from the NHP biopanning showed a very strong and consistent enrichment over AAV9 and PHP.B controls. Further, the peptide of SEQ ID NO: 1725 not only showed a strong enrichment over AAV9 in the brain, but also in the spinal cord, as it led to a 125.6 fold enrichment over AAV9 in the spinal cord. Following the removal of the least reliable variants, a set of 22 variants with enrichment factors ranging from 7-fold to >400-fold over AAV9 was identified. These were cross-referenced to a non-synthetic PCR-amplified library screened in parallel and 12 candidates showed reliable enrichment and high consistency in both assays. Of these, 5 candidates with the highest enrichment scores in both assays and the highest consistency across animals and tissues were retained for individual evaluation. Candidate capsids were labeled TTD-001, TTD-002, TTD-003, TTD-004 and TTD-005 as shown in Table 4 above.

[1825] After 3 rounds of screening of AAV9 peptide insertion library in NHP, many capsids outperformed their parental capsid AAV9 in penetration of the blood brain barrier (BBB). Some of the capsids comprising a peptide showed high enrichment scores and high consistency both across different brain tissue samples from the same animal and across different animals. Consistency in both NNK and NNM codons was also observed. 22 capsid variants exhibited enrichment factors ranging from 7-fold to >400-fold over AAV9 in the brain tissues. A majority of these variants also demonstrated high enrichment factors up to 125-fold over AAV9 in the spinal cord. Of these, 5 candidates with diverse inserted sequences were selected for further evaluation as individual capsids.

### Example 3. Individual Capsid Characterization

[1826] The goal of these experiments was to determine the transduction level and the spatial distribution of each of the 5 capsid candidates selected from the study described in Example 2 relative to AAV9 following intravascular infusion in NHPs (cynomolgus macaque). The 5 selected capsid candidates were TTD-001 (SEQ ID NO: 3623 and 3636, comprising SEQ ID NO: 3648), TTD-002 (SEQ ID NO: 3624, 3625, and 3637, comprising SEQ ID NO: 3649), TTD-003 (SEQ ID NO: 3626 and 3638, comprising SEQ ID NO: 3650), TTD-004 (SEQ ID NO: 3627 and 3639, comprising SEQ ID NO: 3651) and TTD-005 (SEQ ID NO: 3628 and 3640, comprising SEQ ID NO: 3652) as outlined in Table 4 above.

[1827] AAV particles were generated with each of these 5 capsids encapsulating a transgene encoding a payload fused to an HA tag (payload-HA) and driven by a full-length CMV/chicken beta actin promoter by triple transfection in HEK293T cells and formulated in a pharmaceutically acceptable solution. Each test capsid and AAV9 control were tested by intravenously providing two (2) NHP females the AAV particle formulation at a dose of 2e13 VG/kg. The in-life period was 14 days and then a battery of CNS and peripheral tissues were collected for quantification of transgene mRNA, transgene protein and viral DNA (biodistribution). Samples were also collected, fixed and paraffin embedded for immunohistochemical staining.

[1828] In a first pass screening of RNA quantification by qRT-PCR and RT-ddPCR, total RNA was extracted from 3-mm punches from various areas of the brain (cortex, striatum, hippocampus, cerebellum), spinal cord sections, liver and heart, and analyzed by qRT-PCR using a proprietary Taqman set specific for the synthetic CAG exon-exon junction. Cynomolgus TBP (TATA box-binding protein) was used as a housekeeping gene.

[1829] TRACER capsids showed an increase in RNA expression in all brain regions relative to AAV9 in at least one animal. The highest and most consistent increase in brain transduction was observed with capsids TTD-003 and TTD-004 (8- to 200-fold depending in various anatomical locations). In this initial screening TTD-001 was not assessed due to staggered animal dosing. An approximate 10- to 12-fold increase was consistently observed in whole brain slices (equivalent to an average of multiple regions), which was consistent with the values indicated in a next-generation sequencing (NGS) assay. In order to increase data robustness, droplet digital RT-PCR (ddPCR) was performed in parallel to qRT-PCR and confirmed the trends indicated by the qPCR data.

[1830] Interestingly, RNA quantification performed in the spinal cord and dorsal root ganglia indicated important differences between the capsid variants. The spinal cord transduction profile was consistent with the brain, with a strong and consistent increase with TTD-003 and TTD-004 capsids, but interestingly the DRG transduction suggested a substantial detargeting of the TTD-004 capsid, whereas the TTD-003 capsid showed a strongly increased RNA expression.

[1831] Total DNA was extracted from the same brain tissues as RNA, and biodistribution was measured by ddPCR using a Taqman set specific for the CMV promoter sequence. The RNAseP gene was used as a copy number reference. Vector genome (VG) per cell values were determined both by qPCR and ddPCR. Increased biodistribution was observed for the TTD-004 capsid in most brain regions, but surprisingly none of the other candidates showed a significant increase by comparison with AAV9. This apparent contradiction with the RNA quantification data could suggest that some capsids may present improved properties over AAV9 in post-attachment mechanisms rather than strict vector translocation in CNS parenchyma. Interestingly, DNA analysis confirmed the substantial detargeting of TTD-004 capsid from the DRG.

[1832] To further explore the behavior of capsid variant TTD-004, viral genome (VG) quantification was completed from tissues collected from heart atrium, heart ventricle, quadriceps muscle, liver (left and right) and diaphragm and compared to vector genome presence as delivered by AAV9 in the same tissues.

[1833] For TTD-003 and TTD-004 initial immunohistochemical analyses demonstrated the presence of payload-HA to a greater extent than seen with AAV9 delivery in cerebellar tissue, including in the dentate nucleus. Immunohistochemistry confirmed the de-targeting of the dorsal root ganglia for capsid variant TTD-004 as compared to TTD-003 and AAV9.

[1834] Data for each of the variants as described above were compiled as an average mRNA (fold over TBP) or DNA (VG per cell) quantification per capsid variant per tissue as shown in Table 21 below.

TABLE 21
Characterization of exemplary capsid variants

| Measure | Tissue | AAV9 | TTD-001 | TTD-002 | TTD-003 | TTD-004 | TTD-005 |
|---|---|---|---|---|---|---|---|
| mRNA | Frontal | 0.000325065 | 2.7232575 | 0.000768179 | 0.006268831 | 0.007076252 | 0.002204024 |
| | Cortex | | | | | | |
| mRNA | Sensory | 0.001486245 | 3.400055 | 0.00417739 | 0.006788644 | 0.010976612 | 0.004139604 |
| | Cortex | | | | | | |
| mRNA | Motor Cortex | 0.00063318 | 9.00819 | 0.001050247 | 0.009954825 | 0.010522399 | 0.002942249 |
| mRNA | Putamen | 0.000612759 | 3.557205 | 0.001395549 | 0.011832671 | 0.011476176 | 0.001150153 |
| mRNA | Thalamus | 0.002610992 | 2.863635 | 0.013937891 | 0.101411445 | 0.07565653 | 0.01100289 |
| mRNA | Cerebellar | 0.00133497 | 1.3439 | 0.008517779 | 0.006396677 | 0.012964181 | 0.004382119 |
| | Cortex | | | | | | |
| mRNA | Dentate | 0.001364954 | 0.963955 | — | — | — | — |
| | Nucleus | | | | | | |
| mRNA | Caudate | 0.000352281 | 1.3026 | — | 0.003259804 | 0.00634117 | — |
| mRNA | Hippocampus | 0.000311824 | 0.407015 | — | — | — | — |
| mRNA | SC-cervical | 0.012205449 | 11.877762 | 0.022004264 | 0.026994764 | 0.088316491 | 0.005773054 |
| mRNA | SC-Thoracic | 0.048833465 | 2.9974295 | 0.004360318 | 0.035118928 | 0.020543776 | 0.005629959 |
| mRNA | SC-Lumbar | 0.029887407 | 7.969603 | 0.056231995 | 0.016033388 | 0.047713563 | 0.026324154 |
| mRNA | DRG- | 0.74570895 | 9.274951 | 0.007897714 | 2.47872652 | 0.280868887 | 0.008122233 |
| | cervical | | | | | | |
| mRNA | DRG- | 0.5559061 | 5.22606 | 0.006456564 | 8.721845271 | 0.104701895 | — |
| | Thoracic | | | | | | |
| mRNA | DRG- | 1.089758 | 17.308436 | 0.008247771 | 2.271300217 | 0.426704698 | 0.119974244 |
| | Lumbar | | | | | | |
| mRNA | Lung | 0.004807149 | 0.000546842 | — | — | 0.013744781 | — |
| mRNA | Pancreas | — | — | — | — | — | — |
| mRNA | Colon | 0.017962678 | 0.005041385 | — | — | 0.183862903 | — |
| mRNA | Kidney | 0.043825993 | 0.006649157 | — | — | 0.041234576 | — |
| mRNA | Liver | 0.674478605 | 0.253188648 | — | — | 2.578654807 | — |
| mRNA | Adrenal | — | — | — | — | — | — |
| mRNA | Spleen | 0.014066875 | 0.000955981 | — | — | 0.013435626 | — |
| mRNA | Heart | 1.323389668 | 0.132477314 | — | — | 5.587929805 | — |
| mRNA | Quadriceps | 0.116623509 | — | — | — | 4.527799743 | — |
| mRNA | Diaphragm | 0.250001109 | — | — | — | 1.936435215 | — |
| DNA | Frontal | 0.07713 | 2.104843 | 0.10252 | 0.068367 | 0.380429 | 0.1257545 |
| | Cortex | | | | | | |
| DNA | Sensory | 0.093003 | 2.679886 | 0.07443 | 0.034016 | 0.2670975 | 0.132503 |
| | Cortex | | | | | | |
| DNA | Motor Cortex | 0.08796 | 4.3437625 | 0.0913085 | 0.094401 | 0.318999 | 0.1110695 |
| DNA | Putamen | 0.0581365 | 3.07904 | 0.12326 | 0.1497635 | 0.2731175 | 0.0715295 |
| DNA | Thalamus | 0.0524055 | 2.076863 | 0.0664225 | 0.090511 | 0.214999 | 0.086863 |
| DNA | Cerebellar | 0.014238 | 0.186361 | 0.0092915 | 0.009578 | 0.0356345 | 0.0128655 |
| | Cortex | | | | | | |
| DNA | Dentate | 0.025042 | 0.1861975 | 0.210238 | 0.041906 | 0.106107 | 0.055287 |
| | Nucleus | | | | | | |
| DNA | Caudate | 0.079294 | 3.9433175 | — | 0.0529005 | 0.2451035 | — |
| DNA | Hippocampus | 0.095436 | 1.760891 | 0.205433 | 0.368645 | 1.335324 | 0.432829 |
| DNA | SC-cervical | 0.0376 | 1.143863 | 0.061085 | 0.061535 | 0.07573 | 0.05885 |
| DNA | SC-Thoracic | 0.02692 | 0.933734 | 0.025955 | 0.05011 | 0.064915 | 0.0355 |
| DNA | SC-Lumbar | 0.03615 | 0.992728 | 0.019125 | 0.034175 | 0.085165 | 0.051475 |
| DNA | DRG- | 0.0765 | 0.14319 | 0.08196 | 0.13722 | 0.04115 | 0.071625 |
| | cervical | | | | | | |
| DNA | DRG- | 0.165865 | 0.172363 | 0.07202 | 0.133455 | 0.04444 | 0.03139 |
| | Thoracic | | | | | | |
| DNA | DRG- | 0.218725 | 0.385712 | 0.146115 | 0.153205 | 0.032875 | 0.12034 |
| | Lumbar | | | | | | |
| DNA | Lung | 1.085639916 | 3.72 | 0.958576278 | 0.700015423 | 1.22442329 | 0.919823152 |
| DNA | Pancreas | 0.256670617 | 20.535 | 0.320558325 | 0.240633195 | 0.067860607 | 0.004802583 |
| DNA | Colon | 0.053867646 | 3.405 | 1.179065405 | 0.348969617 | 0.116867365 | 0.015288464 |
| DNA | Kidney | 0.896656371 | 26.635 | 4.861362029 | 0.532746958 | 0.386522209 | 7.973793288 |
| DNA | Liver | 207.332334 | 217.64 | 111.910319 | 193.8349405 | 448.5980021 | 213.0317219 |
| DNA | Adrenal | 1.647725996 | 0.69 | 1.561129869 | 1.871878 | 1.269473156 | 0.847293047 |
| DNA | Spleen | 14.93815481 | 20.43565 | 51.70294001 | 22.79095714 | 6.514778227 | 45.91987284 |
| DNA | Heart | 2.012377817 | 14.49 | 0.757528914 | 1.780956673 | 3.814571986 | 0.44694144 |
| DNA | Quadriceps | 0.724278943 | 1.285 | 0.476250457 | 1.366015493 | 5.611203726 | 0.646197937 |
| DNA | Diaphragm | — | 1.06 | — | — | — | — |

[1835] When calculated as fold over AAV9 the data were as shown in Table 22 below.

TABLE 22
Characterization of exemplary capsid variants

| Measure | Tissue | AAV9 | TTD-001 | TTD-002 | TTD-003 | TTD-004 | TTD-005 |
|---|---|---|---|---|---|---|---|
| mRNA | Frontal Cortex | 1.0 | 8378 | 2.4 | 19.3 | 21.8 | 6.8 |
| mRNA | Sensory Cortex | 1.0 | 2288 | 2.8 | 4.6 | 7.4 | 2.8 |
| mRNA | Motor Cortex | 1.0 | 14227 | 1.7 | 15.7 | 16.6 | 4.6 |
| mRNA | Putamen | 1.0 | 5805 | 2.3 | 19.3 | 18.7 | 1.9 |
| mRNA | Thalamus | 1.0 | 1097 | 5.3 | 38.8 | 29.0 | 4.2 |
| mRNA | Cerebellar | 1.0 | 1007 | 6.4 | 4.8 | 9.7 | 3.3 |
| | Cortex | | | | | | |
| mRNA | Dentate | 1.0 | 706 | — | — | — | — |
| | Nucleus | | | | | | |
| mRNA | Caudate | 1.0 | 3698 | — | — | — | — |
| mRNA | Hippocampus | 1.0 | 1305 | — | — | — | — |
| mRNA | SC-cervical | 1.0 | 973 | 1.8 | 2.2 | 7.2 | 0.5 |
| mRNA | SC-Thoracic | 1.0 | 61 | 0.1 | 0.7 | 0.4 | 0.1 |
| mRNA | SC-Lumbar | 1.0 | 267 | 1.9 | 0.5 | 1.6 | 0.9 |
| mRNA | DRG-cervical | 1.0 | 12 | 0.0 | 3.3 | 0.4 | 0.0 |
| mRNA | DRG-Thoracic | 1.0 | 9 | 0.0 | 15.7 | 0.2 | — |
| mRNA | DRG-Lumbar | 1.0 | 16 | 0.0 | 2.1 | 0.4 | 0.1 |
| mRNA | Lung | 1.0 | 0.11 | — | — | 2.9 | — |
| mRNA | Pancreas | — | — | — | — | — | — |
| mRNA | Colon | 1.0 | 0.28 | — | — | 10.2 | — |
| mRNA | Kidney | 1.0 | 0.15 | — | — | 0.9 | — |
| mRNA | Liver | 1.0 | 0.38 | — | — | 3.8 | — |
| mRNA | Adrenal | — | — | — | — | — | — |
| mRNA | Spleen | 1.0 | 0.07 | — | — | 1.0 | — |
| mRNA | Heart | 1.0 | 0.10 | — | — | 4.2 | — |
| mRNA | Quadriceps | 1.0 | — | — | — | 38.8 | — |
| mRNA | Diaphragm | 1.0 | — | — | — | 7.7 | — |
| DNA | Frontal Cortex | 1.0 | 27.29 | 1.3 | 0.9 | 4.9 | 1.6 |
| DNA | Sensory Cortex | 1.0 | 28.82 | 0.8 | 0.4 | 2.9 | 1.4 |
| DNA | Motor Cortex | 1.0 | 49.38 | 1.0 | 1.1 | 3.6 | 1.3 |
| DNA | Putamen | 1.0 | 52.96 | 2.1 | 2.6 | 4.7 | 1.2 |
| DNA | Thalamus | 1.0 | 39.63 | 1.3 | 1.7 | 4.1 | 1.7 |
| DNA | Cerebellar | 1.0 | 13.09 | 0.7 | 0.7 | 2.5 | 0.9 |
| | Cortex | | | | | | |
| DNA | Dentate | 1.0 | 7.44 | 8.4 | 1.7 | 4.2 | 2.2 |
| | Nucleus | | | | | | |
| DNA | Caudate | 1.0 | 49.73 | — | 0.7 | 3.1 | — |
| DNA | Hippocampus | 1.0 | 18.45 | 2.2 | 3.9 | 14.0 | 4.5 |
| DNA | SC-cervical | 1.0 | 30.42 | 1.6 | 1.6 | 2.0 | 1.6 |
| DNA | SC-Thoracic | 1.0 | 34.69 | 1.0 | 1.9 | 2.4 | 1.3 |
| DNA | SC-Lumbar | 1.0 | 27.46 | 0.5 | 0.9 | 2.4 | 1.4 |
| DNA | DRG-cervical | 1.0 | 1.87 | 1.1 | 1.8 | 0.5 | 0.9 |
| DNA | DRG-Thoracic | 1.0 | 1.04 | 0.4 | 0.8 | 0.3 | 0.2 |
| DNA | DRG-Lumbar | 1.0 | 1.76 | 0.7 | 0.7 | 0.2 | 0.6 |
| DNA | Lung | 1.0 | 3.43 | 0.9 | 0.6 | 1.1 | 0.8 |
| DNA | Pancreas | 1.0 | 80.01 | 1.2 | 0.9 | 0.3 | 0.0 |
| DNA | Colon | 1.0 | 63.21 | 21.9 | 6.5 | 2.2 | 0.3 |
| DNA | Kidney | 1.0 | 29.70 | 5.4 | 0.6 | 0.4 | 8.9 |
| DNA | Liver | 1.0 | 1.05 | 0.5 | 0.9 | 2.2 | 1.0 |
| DNA | Adrenal | 1.0 | 0.42 | 0.9 | 1.1 | 0.8 | 0.5 |
| DNA | Spleen | 1.0 | 1.37 | 3.5 | 1.5 | 0.4 | 3.1 |
| DNA | Heart | 1.0 | 7.20 | 0.4 | 0.9 | 1.9 | 0.2 |
| DNA | Quadriceps | 1.0 | 1.77 | 0.7 | 1.9 | 7.7 | 0.9 |
| DNA | Diaphragm | — | — | — | — | — | — |

[1836] Capsid variant TTD-001 showed greater than 5,000 fold increase in payload-HA levels delivered to the brain as compared to AAV9 and measured by qRT-PCR and normalized to TBP. In all CNS tissues measured, TTD-001 showed dramatically enhanced delivery of payload-HA as compared to AAV9. For example, analysis of the cervical, thoracic, and lumbar spinal cord revealed robust expression of payload-HA mRNA and DNA with the TTD-001 capsid relative to the wild-type AAV9 capsid (approximately 100-1000-fold higher mRNA expression and approximately 30-fold higher DNA levels (VG/cell) with TTD-001 relative to wild-type AAV9) (Tables 21 and 22).

[1837] Immunohistochemistry of fixed brain tissues revealed dramatic transduction in both NHP tested by TTD-001 of the dentate nucleus, cerebellar cortex, cerebral cortex, brain stem, hippocampus, thalamus and putamen. AAV9 transduction of the dentate nucleus, cerebellar cortex, cerebral cortex, hippocampus, thalamus and putamen appeared negligible in comparison. TTD-001 therefore demonstrated broad and robust expression and distribution in the brain following intravenous administration in NHPs. In the dorsal root ganglia, both TTD-001 and AAV9 showed similar IHC patterns. Additionally, robust expression of the payload-HA was observed in the Dorsal horn, Clarke's column, and ventral horn of the spinal cord with the TTD-001 capsid, whereas expression was relatively undetectable with the wild-type AAV9 capsid (FIG. 11).

### Example 4. Maturation of TTD-001 Capsid in NHPs

[1838] This Example describes maturation of the TTD-001 (SEQ ID NO: 3623 (DNA) and 3636 (amino acid), comprising SEQ ID NO: 3648) capsid variant to further enhance its transduction and biodistribution in the central nervous system and evolve the AAV capsid variants further. Two approaches were used to mature the TTD-001 capsid sequence in order to randomize and mutate within and around the peptide insert comprised within loop VIII of the capsid variant. In the first maturation approach, sets of three contiguous amino acids were randomized across the mutagenesis region in the TTD-001 sequence, which spanned from position 587 to position 602, numbered according to SEQ ID NO: 3636. In the second maturation approach, mutagenic primers were used to introduce point mutations at a low frequency, scattered across the mutagenesis region in the TTD-001 sequences ranging from position 587 to position 602, numbered according to SEQ ID NO: 3636. AAV capsid variants arising from each maturation approach for TTD-001 were pooled together, for subsequent testing and characterization in NHPs (Macaca fascicularis and Callithrix jacchus).

[1839] The library of pooled matured AAV capsid variants generated from TTD-001 matured AAV capsid variant were injected into two cynomolgus macaques (Macaca fascicularis), two marmosets (Callithrix jacchus). After a period in life, the brains of the NHPs were isolated and RNA was extracted from three samples per NHP. Following RNA recovery and RT-PCR amplification, a systematic NGS enrichment analysis was performed to calculate the fold enrichment ratio relative to the corresponding TTD-001 control, and the peptides comprised within the variants were identified. The coefficient of variance (CV) was calculated for each peptide across the six samples, and those that had a CV value <1 were identified, as these were the peptides that were reliably detected in 5/6 or 6/6 of the brain samples isolated from the two NHPs. The average number of reads for each peptide across the samples investigated was also quantified. These TTD-001 matured capsid variants and their peptide sequences are provided in Table 23 (cynomolgus macaques (Macaca fascicularis)) and Table 24 (marmosets (Callithrix jacchus)).

[1840] As shown in Table 23, approximately 338 TTD-001 matured capsid variants demonstrated increased expression relative to the non-matured TTD-001 control, and several variants demonstrated greater than a two-fold enrichment relative to the non-matured TTD-001 control, in cynomolgus macaques (Macaca fascicularis). Also, across the peptides comprised within the TTD-001 matured capsid variants with the greatest fold-enrichment relative to the non-matured TTD-001 capsid in the brains of cynomolgus macaques, it was observed that the modifications in the variant sequences appeared in the C-terminal portion, specifically at residues corresponding to positions 593-595 of a reference sequence numbered according to the amino acid sequence of SEQ ID NO: 138. Additionally, 378 of the top peptides in Table 23 had an average read value of 1 or greater per sample, demonstrating that more functional capsid material was recovered, which could be indicative of less aggregation.

[1841] As shown in Table 24, many TTD-001 matured capsid variants demonstrated increased expression relative to both the AAV9 and the non-matured TTD-001 controls in the brains of marmosets. Approximately, 967 TTD-001 matured variants demonstrated increased expression relative to the non-matured TTD-001 control in the brain of marmosets, with 296 variants showing at least a 10-fold enrichment or greater relative to the non-matured TTD-001 control. Approximately, 850 TTD-001 matured variants demonstrated increased expression relative to AAV9 in the brain of marmosets, with 222 variants showing at least a 10-fold enrichment or greater relative to AAV9. With respect to those TTD-001 matured variants that demonstrated an increased expression in marmosets, it was observed that the majority comprised an amino acid other than Q at position 604 (e.g., Q604) numbered according to SEQ ID NO: 5, 8, or 3636 or at position 597 (Q597) numbered according to SEQ ID NO: 138 (e.g., an E, H, K, or P), such that they comprised the triplet “VEN,” “VHN,” “VKN,” or “VPN” at their C-terminus (corresponding to positions 596-598 of SEQ ID: 138 or positions 603-605 of SEQ ID NO: 5, 8, and 3636). Many of these TTD-001 matured variants also demonstrated an increased expression in the brain of cynomolgus macaques relative to AAV9 (Table 24), including the TTD-001 matured capsid variant comprising the sequence PLNGAVHLYAQAQLSPVKN (SEQ ID NO: 566) and the TTD-001 matured capsid variant comprising the sequence PLNGAVHLYAQAQTGWVPN (SEQ ID NO: 314).

[1842] The fold-change in expression relative to AAV9 and TTD-001 was also calculated in the DRG, heart, muscle (quadriceps), and liver for the TTD-001 matured variants in cynomolgus macaques. The fold-change in the DRG is shown in Table 24, with several variants showing decreased or comparable expression in the DRG relative to AAV9. These variants also demonstrated comparable or lower expression relative to AAV9 in the heart, muscle, and liver.

[1843] Taken together, these data demonstrate that following two maturation approaches, matured TTD-001 capsid variants with loop VIII modifications were generated with significantly enhanced CNS tropism in NHPs (cynomolgus macaques (Macaca fascicularis) and marmosets (Callithrix jacchus)), compared to the corresponding non-matured TTD-001 capsid variant, which already exhibited a significant fold enrichment over AAV9 in the NHP brain.

TABLE 23
NGS fold-enrichment of TTD-001 matured AAV
capsid variants in the brain of NHPs

| | | | Fold | |
|---|---|---|---|---|
| | SEQ | | enrichment | |
| Peptide | ID | | over | Avg. |
| Sequence | NO: | CV | TTD-001 | Reads |
| QLNGAVHLYA | 139 | 0.206 | 5.617 | 0.09 |
| QAQLSPVQN | | | | |
| PLDGAVHLYA | 140 | 0.829 | 5.133 | 4.02 |
| QPQTGWVQN | | | | |
| QLNGAVHLYA | 141 | 0.770 | 4.088 | 0.09 |
| QAQTMSVQN | | | | |
| PLDSSVHLYA | 142 | 0.882 | 3.891 | 1.4 |
| QAQTGWVQN | | | | |
| PLNGAVHLYA | 143 | 0.879 | 3.879 | 5.47 |
| QAQTTKVQN | | | | |
| PLDGAVHLYA | 144 | 0.586 | 3.835 | 11.08 |
| QAQTGSVQN | | | | |
| ALNGAVHLYA | 145 | 0.865 | 3.765 | 0.09 |
| QAQTTSVQN | | | | |
| PLNGSVHLYA | 146 | 0.509 | 3.708 | 0.09 |
| QAQTMSVQN | | | | |
| QLNGAVHLYA | 147 | 0.310 | 3.638 | 0.14 |
| QAQTSPVQN | | | | |
| PLNGAVHLYA | 148 | 0.547 | 3.634 | 5.61 |
| QAQTMKVQN | | | | |
| PLNGAVHLYA | 149 | 0.397 | 3.550 | 21.87 |
| QAQVAQVQN | | | | |
| PLDGAVHLYA | 150 | 0.771 | 3.509 | 2.29 |
| QAQTGGVQN | | | | |
| PLNGAVHLYA | 151 | 0.344 | 3.373 | 0.09 |
| QAQTAWDQN | | | | |
| PLNGSVHLYA | 152 | 0.190 | 3.335 | 0.23 |
| QAQTGWDQN | | | | |
| PLNGAVHLYA | 153 | 0.235 | 3.287 | 0.14 |
| QAQTGSVQH | | | | |
| PLNGAVHLYA | 154 | 0.564 | 3.259 | 4.25 |
| QAQVKQVQN | | | | |
| PLNGAVHLYA | 155 | 0.763 | 3.239 | 24.54 |
| QAQSAPVQN | | | | |
| PLNGAVHLYA | 156 | 0.591 | 3.156 | 6.73 |
| QAQLSKVQN | | | | |
| PLNGAVHLYA | 157 | 0.587 | 3.107 | 31.03 |
| QAQLAPVQN | | | | |
| PLNGAVHLYA | 158 | 0.416 | 3.061 | 15.33 |
| QAQLAQVQN | | | | |
| QLNGAVHLYA | 159 | 0.295 | 3.051 | 0.09 |
| QAQVASVQN | | | | |
| PLNGAVHLYA | 160 | 0.877 | 2.998 | 8.97 |
| QAQTAKVQN | | | | |
| PLNGAVHLYA | 161 | 0.678 | 2.971 | 3.27 |
| QAQSAKVQN | | | | |
| PLNGAVHLYA | 162 | 0.095 | 2.962 | 0.09 |
| QAQTGCFQN | | | | |
| PLNGAVHLYA | 163 | 0.705 | 2.958 | 5.51 |
| QAQTQKVQN | | | | |
| PLNGSVHLYA | 164 | 0.529 | 2.873 | 0.09 |
| QAQTTSVQN | | | | |
| PLNGGVHLYA | 165 | 0.820 | 2.858 | 4.25 |
| QAQTGRVQN | | | | |
| PLNGAVHLYA | 166 | 0.410 | 2.854 | 30.94 |
| QAQTVAVQN | | | | |
| ALNGAVHLYA | 167 | 0.542 | 2.851 | 0.09 |
| QAQSSPVQN | | | | |
| PLNGAVHLYA | 168 | 0.313 | 2.820 | 63.28 |
| QAQLSPVQN | | | | |
| QLNGAVHLYA | 169 | 0.846 | 2.769 | 0.14 |
| QAQTTSVQN | | | | |
| PLNGAVHLYA | 170 | 0.334 | 2.719 | 18.37 |
| QAQTTQVQN | | | | |
| PLNGAVHLYA | 171 | 0.523 | 2.707 | 25.84 |
| QAQTAQVQN | | | | |
| QLNGAVHLYA | 172 | 0.195 | 2.682 | 0.09 |
| QAQTVAVQN | | | | |
| PLNGAVHLYA | 173 | 0.682 | 2.652 | 3.27 |
| QAQRIAVQN | | | | |
| PLNGAVHLYA | 174 | 0.340 | 2.634 | 17.34 |
| QAQRASVQN | | | | |
| PLNGAVHLYA | 175 | 0.400 | 2.620 | 45.19 |
| QAQTTPVQN | | | | |
| QLNGAVHLYA | 176 | 0.474 | 2.613 | 0.09 |
| QAQLASVQN | | | | |
| PLNGAVHLYA | 177 | 0.528 | 2.574 | 39.86 |
| QAQLTPVQN | | | | |
| PLNGAVHLYA | 178 | 0.519 | 2.572 | 26.5 |
| QAQSTPVQN | | | | |
| PLNGAVHLYA | 179 | 0.335 | 2.562 | 72.81 |
| QAQTSPVQN | | | | |
| QLNGAVHLYA | 180 | 0.428 | 2.528 | 0.09 |
| QAQVSQVQN | | | | |
| PLNGAVHLYA | 181 | 0.625 | 2.523 | 19.96 |
| QAQTMQVQN | | | | |
| PLNGAVHLYA | 182 | 0.458 | 2.476 | 8.32 |
| QAQTSKVQN | | | | |
| SLNGAVHLYA | 183 | 0.282 | 2.417 | 0.09 |
| QAQVSPVQN | | | | |
| PLNGAVHLYA | 184 | 0.259 | 2.411 | 34.72 |
| QAQVSQVQN | | | | |
| PLNGAVHLYA | 185 | 0.721 | 2.404 | 63.42 |
| QAQVSPVQN | | | | |
| PLNGAVHLYA | 186 | 0.586 | 2.389 | 15.56 |
| QAQTVQVQN | | | | |
| PLNGAVHLYA | 187 | 0.476 | 2.367 | 13.65 |
| QAQVTAVQN | | | | |
| PLNGAVHLYA | 188 | 0.715 | 2.353 | 8.74 |
| QAQRQPVQN | | | | |
| PLNGNVHLYA | 189 | 0.732 | 2.346 | 2.38 |
| QAQTGGVQN | | | | |
| PLDGAVHLYA | 190 | 0.697 | 2.339 | 7.06 |
| QAQTAWVQN | | | | |
| PLNGAVHLYA | 191 | 0.785 | 2.331 | 9.91 |
| QAQISGVQN | | | | |
| PLNGAVHLYA | 192 | 0.794 | 2.324 | 6.22 |
| QAQVRPVQN | | | | |
| PLNGAVHLYA | 193 | 0.722 | 2.299 | 20.47 |
| QAQLGPVQN | | | | |
| PLNGAVHLYA | 194 | 0.404 | 2.290 | 4.91 |
| QAQTNQVQN | | | | |
| PLNGAVHLYA | 195 | 0.291 | 2.240 | 14.39 |
| QAQVQQVQN | | | | |
| PLNGAVHLYA | 196 | 0.520 | 2.238 | 9.21 |
| QAQVANVQN | | | | |
| PLNGAVHLYA | 197 | 0.664 | 2.200 | 10.75 |
| QAQAAPVQN | | | | |
| QLNGAVHLYA | 198 | 0.388 | 2.199 | 0.09 |
| QAQVAQVQN | | | | |
| PLNGAVHLYA | 199 | 0.487 | 2.195 | 21.59 |
| QAQRSTVQN | | | | |
| PLNGAVHLYA | 200 | 0.334 | 2.190 | 29.72 |
| QAQTMAVQN | | | | |
| PLNGAVHLYA | 201 | 0.838 | 2.182 | 7.1 |
| QAQIQPVQN | | | | |
| PLNGAVHLYA | 202 | 0.567 | 2.181 | 15.52 |
| QAQIASVQN | | | | |
| PLNGAVHLYA | 203 | 0.172 | 2.176 | 76.22 |
| QAQTVSVQN | | | | |
| PLNGAVHLYA | 204 | 0.585 | 2.156 | 12.43 |
| QAQRGSVQN | | | | |
| PLNGAVHLYA | 205 | 0.376 | 2.143 | 12.85 |
| QAQNSPVQN | | | | |
| PLNGAVHLYA | 206 | 0.363 | 2.131 | 24.3 |
| QAQLQPVQN | | | | |
| PLNGAVHLYA | 207 | 0.550 | 2.125 | 11.68 |
| QAQVTGVQN | | | | |
| PLNGAVHLYA | 208 | 0.810 | 2.121 | 11.26 |
| QAQVMQVQN | | | | |
| PLNGAVHLYA | 209 | 0.697 | 2.104 | 14.86 |
| QAQSMAVQN | | | | |
| PLNGAVHLYA | 210 | 0.611 | 2.104 | 4.49 |
| QAQVGKVQN | | | | |
| ALNGAVHLYA | 211 | 0.652 | 2.101 | 0.09 |
| QAQSAPVQN | | | | |
| PLNGAVHLYA | 212 | 0.498 | 2.101 | 3.97 |
| QAQIQSVQN | | | | |
| PLNGAVHLYA | 213 | 0.537 | 2.097 | 17.15 |
| QAQCSPVQN | | | | |
| PLNGAVHLYA | 214 | 0.821 | 2.079 | 3.97 |
| QAQLQRVQN | | | | |
| PLNGAVHLYA | 215 | 0.330 | 2.063 | 0.09 |
| QAQTAWVQH | | | | |
| PLDGAVHLYA | 216 | 0.650 | 2.062 | 0.09 |
| QAQTGWDQN | | | | |
| PLNGAVHLYA | 217 | 0.411 | 2.062 | 0.89 |
| QAQTPPVQN | | | | |
| PLNGAVHLYA | 218 | 0.635 | 2.054 | 1.68 |
| QAQVTKVQN | | | | |
| PLNGAVHLYA | 219 | 0.556 | 2.033 | 50.94 |
| QAQSSPVQN | | | | |
| PLNGAVHLYA | 220 | 0.793 | 2.015 | 9.07 |
| QAQAGPVQN | | | | |
| PLNGAVHLYA | 221 | 0.773 | 2.014 | 5.89 |
| QAQLARVQN | | | | |
| PLNGAVHLYA | 222 | 0.789 | 2.013 | 16.36 |
| QAQTTTVQN | | | | |
| PLNGAVHLYA | 223 | 0.254 | 2.011 | 0.09 |
| QAQTGGFQN | | | | |
| PLNGAVHLYA | 224 | 0.657 | 2.010 | 24.44 |
| QAQTLQVQN | | | | |
| PLNGAVHLYA | 225 | 0.359 | 2.005 | 63.42 |
| QAQTMSVQN | | | | |
| QLNGAVHLYA | 226 | 0.675 | 2.004 | 0.09 |
| QAQLQPVQN | | | | |
| PLNGAVHLYA | 227 | 0.894 | 1.994 | 10.47 |
| QAQVAKVQN | | | | |
| PLNGAVHLYA | 228 | 0.217 | 1.989 | 7.24 |
| QAQRAAVQN | | | | |
| PLNGAVHLYA | 229 | 0.413 | 1.988 | 38.79 |
| QAQTVGVQN | | | | |
| PLNGAVHLYA | 230 | 0.381 | 1.972 | 15.84 |
| QAQLNPVQN | | | | |
| PLNGAVHLYA | 231 | 0.379 | 1.971 | 26.17 |
| QAQLSQVQN | | | | |
| PLNGTVHLYA | 232 | 0.421 | 1.967 | 23.37 |
| QAQTGSVQN | | | | |
| PLNGAVHLYA | 233 | 0.543 | 1.960 | 12.95 |
| QAQTKPVQN | | | | |
| PLNGAVHLYA | 234 | 0.603 | 1.957 | 7.71 |
| QAQTNAVQN | | | | |
| ALDGAVHLYA | 235 | 0.660 | 1.955 | 21.4 |
| QAQTGWVQN | | | | |
| PLNGAVHLYA | 236 | 0.303 | 1.955 | 22.06 |
| QAQLATVQN | | | | |
| PLNGAVHLYA | 237 | 0.794 | 1.947 | 40.85 |
| QAQVTPVQN | | | | |
| PLNGAVHLYA | 238 | 0.339 | 1.946 | 22.2 |
| QAQVQAVQN | | | | |
| PLNGAVHLYA | 239 | 0.645 | 1.926 | 58.32 |
| QAQTTSVQN | | | | |
| PLNGAVHLYA | 240 | 0.702 | 1.923 | 9.21 |
| QAQCTPVQN | | | | |
| ALNGAVHLYA | 241 | 0.621 | 1.916 | 9.58 |
| QAQTGRVQN | | | | |
| PLNGSVHLYA | 242 | 0.173 | 1.908 | 0.09 |
| QAQTGWVQD | | | | |
| PLNGAVHLYA | 243 | 0.555 | 1.903 | 30.47 |
| QAQTAGVQN | | | | |
| PLNGAVHLYA | 244 | 0.431 | 1.902 | 29.82 |
| QAQTSQVQN | | | | |
| PLNGAVHLYA | 245 | 0.443 | 1.895 | 6.4 |
| QAQTMNVQN | | | | |
| PLNGAVHLYA | 246 | 0.323 | 1.885 | 34.16 |
| QAQTSTVQN | | | | |
| PLNGAVHLYA | 247 | 0.712 | 1.882 | 12.43 |
| QAQVKPVQN | | | | |
| PLNGAVHLYA | 248 | 0.627 | 1.878 | 24.91 |
| QAQASPVQN | | | | |
| PLNGAVHLYA | 249 | 0.447 | 1.873 | 23.27 |
| QAQVAAVQN | | | | |
| PLNGAVHLYA | 250 | 0.692 | 1.869 | 8.74 |
| QAQLKSVQN | | | | |
| PLNGAVHLYA | 251 | 0.834 | 1.855 | 8.09 |
| QAQIAAVQN | | | | |
| PLNGAVHLYA | 252 | 0.115 | 1.850 | 26.78 |
| QAQTAAVQN | | | | |
| PLNGAVHLYA | 253 | 0.742 | 1.850 | 10.05 |
| QAQTKAVQN | | | | |
| PLNGAVHLYA | 254 | 0.223 | 1.848 | 0.09 |
| QAQTGSVQS | | | | |
| PLNGAVHLYA | 255 | 0.518 | 1.845 | 7.66 |
| QAQVSNVQN | | | | |
| PLNGAVHLYA | 256 | 0.690 | 1.834 | 38.65 |
| QAQTAPVQN | | | | |
| PLNGAVHLYA | 257 | 0.740 | 1.833 | 28.13 |
| QAQLMPVQN | | | | |
| PLNGAVHLYA | 258 | 0.798 | 1.824 | 8.88 |
| QAQLHPVQN | | | | |
| PLNGAVHLYA | 259 | 0.793 | 1.823 | 5.09 |
| QAQRAQVQN | | | | |
| PLNGAVHLYA | 260 | 0.871 | 1.823 | 1.92 |
| QAQLTNVQN | | | | |
| PLNGAVHLYA | 261 | 0.766 | 1.822 | 13.18 |
| QAQRTTVQN | | | | |
| PLNGAVHLYA | 262 | 0.700 | 1.821 | 17.9 |
| QAQTSVVQN | | | | |
| SLNGAVHLYA | 263 | 0.867 | 1.819 | 0.14 |
| QAQTMSVQN | | | | |
| ALNGAVHLYA | 264 | 0.672 | 1.818 | 0.09 |
| QAQTLAVQN | | | | |
| PLNGAVHLYA | 265 | 0.736 | 1.816 | 12.2 |
| QAQRMSVQN | | | | |
| ALNGAVHLYA | 266 | 0.342 | 1.813 | 0.14 |
| QAQLTPVQN | | | | |
| PLNGAVHLYA | 267 | 0.785 | 1.807 | 3.65 |
| QAQVGNVQN | | | | |
| PLNGAVHLYA | 268 | 0.615 | 1.805 | 4.91 |
| QAQLMQVQN | | | | |
| PLNGSVHLYA | 269 | 0.550 | 1.795 | 0.09 |
| QAQTAQVQN | | | | |
| PLNGAVHLYA | 270 | 0.544 | 1.793 | 24.12 |
| QAQTATVQN | | | | |
| PLNGAVHLYA | 271 | 0.727 | 1.790 | 7.8 |
| QAQVHPVQN | | | | |
| PLNGAVHLYA | 272 | 0.836 | 1.771 | 0.09 |
| QAQVSPVQT | | | | |
| PLNGAVHLYA | 273 | 0.638 | 1.766 | 9.11 |
| QAQISSVQN | | | | |
| PLNGAVHLYA | 274 | 0.333 | 1.765 | 62.16 |
| QAQVASVQN | | | | |
| PLNGAVHLYA | 275 | 0.347 | 1.757 | 0.09 |
| QAQTRWDQN | | | | |
| PLNGAVHLYA | 276 | 0.508 | 1.750 | 8.88 |
| QAQTMTVQN | | | | |
| PLNGAVHLYA | 277 | 0.551 | 1.747 | 34.21 |
| QAQRSSVQN | | | | |
| PLNGGVHLYA | 278 | 0.547 | 1.743 | 0.09 |
| QAQTGWVRN | | | | |
| PLNGAVHLYA | 279 | 0.281 | 1.741 | 213 |
| QAQTAWVQN | | | | |
| PLNGSVHLYA | 280 | 0.130 | 1.734 | 0.28 |
| QAQPGWVQN | | | | |
| ALNGAVHLYA | 281 | 0.238 | 1.724 | 0.09 |
| QAQTGWAQN | | | | |
| PLNGAVHLYA | 282 | 0.791 | 1.724 | 8.93 |
| QAQRTGVQN | | | | |
| ALNGAVHLYA | 283 | 0.370 | 1.720 | 0.09 |
| QAQTGWVQS | | | | |
| PLNGAVHLYA | 284 | 0.561 | 1.701 | 22.34 |
| QAQVATVQN | | | | |
| PLNGAVHLYA | 285 | 0.480 | 1.700 | 16.68 |
| QAQVTSVQN | | | | |
| PLNGAVHLYA | 286 | 0.313 | 1.699 | 74.78 |
| QAQVSSVQN | | | | |
| PLNGSVHLYA | 287 | 0.353 | 1.683 | 0.14 |
| QAQTSSVQN | | | | |
| PLNGAVHLYA | 288 | 0.348 | 1.682 | 18.83 |
| QAQTNSVQN | | | | |
| PLNGAVHLYA | 289 | 0.815 | 1.681 | 6.03 |
| QAQVKAVQN | | | | |
| PLNGAVHLYA | 290 | 0.689 | 1.666 | 19.02 |
| QAQSGPVQN | | | | |
| PLNGAVHLYA | 291 | 0.660 | 1.663 | 25.61 |
| QAQTGPVQN | | | | |
| PLNGAVHLYA | 292 | 0.537 | 1.660 | 22.9 |
| QAQTAMVQN | | | | |
| PLNGAVHLYA | 293 | 0.358 | 1.628 | 32.11 |
| QAQTQPVQN | | | | |
| PLNGSVHLYA | 294 | 0.533 | 1.625 | 32.76 |
| QAQTGSVQN | | | | |
| PLNGAVHLYA | 295 | 0.519 | 1.625 | 14.44 |
| QAQTQQVQN | | | | |
| PLNGAVHLYA | 296 | 0.824 | 1.620 | 9.86 |
| QAQVSRVQN | | | | |
| QLNGAVHLYA | 297 | 0.436 | 1.617 | 0.09 |
| QAQVLPVQN | | | | |
| PLNGAVHLYA | 298 | 0.266 | 1.610 | 0.14 |
| QAQTGWVQP | | | | |
| QLNGAVHLYA | 299 | 0.776 | 1.609 | 0.09 |
| QAQLGSVQN | | | | |
| PLNGAVHLYA | 300 | 0.360 | 1.604 | 40.29 |
| QAQVSAVQN | | | | |
| PLNGAVHLYA | 301 | 0.593 | 1.604 | 7.8 |
| QAQVLSVQN | | | | |
| PLNGAVHLYA | 302 | 0.861 | 1.601 | 5.05 |
| QAQTQHVQN | | | | |
| PLNGAVHLYA | 303 | 0.113 | 1.590 | 52.72 |
| QAQLASVQN | | | | |
| PLNGAVHLYA | 304 | 0.649 | 1.581 | 8.83 |
| QAQQAPVQN | | | | |
| PLNGAVHLYA | 305 | 0.577 | 1.574 | 3.08 |
| QAQNAQVQN | | | | |
| PLNGAVHLYA | 306 | 0.760 | 1.567 | 12.81 |
| QAQATPVQN | | | | |
| PLNGAVHLYA | 307 | 0.544 | 1.567 | 28.13 |
| QAQVQPVQN | | | | |
| PLNGAVHLYA | 308 | 0.537 | 1.563 | 33.13 |
| QAQTTAVQN | | | | |
| PLNGAVHLYA | 309 | 0.455 | 1.561 | 3.46 |
| QAQTGWVRN | | | | |
| PLNGAVHLYA | 310 | 0.357 | 1.561 | 21.83 |
| QAQLAAVQN | | | | |
| PLNGAVHLYA | 311 | 0.418 | 1.555 | 0.09 |
| QAQTSPDQN | | | | |
| PLNGAVHLYA | 312 | 0.393 | 1.553 | 16.36 |
| QAQRSGVQN | | | | |
| PLNGAVHLYA | 313 | 0.218 | 1.551 | 0.65 |
| QAQTGGVQT | | | | |
| PLNGAVHLYA | 314 | 0.274 | 1.546 | 0.93 |
| QAQTGWVPN | | | | |
| PLDSAVHLYA | 315 | 0.833 | 1.539 | 10.89 |
| QAQTGWVQN | | | | |
| PLNGAVHLYA | 316 | 0.496 | 1.537 | 0.09 |
| QAQTTPVQT | | | | |
| PLNGAVHLYA | 317 | 0.540 | 1.535 | 7.94 |
| QAQLMAVQN | | | | |
| PLNGAVHLYA | 318 | 0.596 | 1.532 | 36.69 |
| QAQTMPVQN | | | | |
| PLNGAVHHYA | 319 | 0.391 | 1.529 | 0.09 |
| QAQTSPVQN | | | | |
| PLNGAVHLYA | 320 | 0.756 | 1.527 | 7.8 |
| QAQLANVQN | | | | |
| PLNGAVHLYA | 321 | 0.606 | 1.520 | 11.68 |
| QAQVSTVQN | | | | |
| PLNGAVHLYA | 322 | 0.602 | 1.518 | 12.9 |
| QAQSAQVQN | | | | |
| PLNGAVHLYA | 323 | 0.838 | 1.508 | 8.13 |
| QAQNTPVQN | | | | |
| PLNGAVHLYA | 324 | 0.381 | 1.495 | 0.09 |
| QAQVSSVQT | | | | |
| PLNGAVHLYA | 325 | 0.284 | 1.492 | 0.09 |
| QAQTVSVKN | | | | |
| PLNGAVHLYA | 326 | 0.710 | 1.488 | 9.21 |
| QPQTGLVQN | | | | |
| PLNGAVHLYA | 327 | 0.287 | 1.487 | 621.2 |
| QAQTGSVQN | | | | |
| SLNGAVHLYA | 328 | 0.437 | 1.485 | 0.09 |
| QAQTLPVQN | | | | |
| PLNGAVHLYA | 329 | 0.440 | 1.478 | 0.09 |
| QAQTGGAQN | | | | |
| SLNGAVHLYA | 330 | 0.618 | 1.477 | 0.09 |
| QAQTAQVQN | | | | |
| PLNGAVHLYA | 331 | 0.684 | 1.466 | 14.21 |
| QAQTAVVQN | | | | |
| PLNGAVHLYA | 332 | 0.533 | 1.456 | 17.71 |
| QAQRLGVQN | | | | |
| PLNGSVHLYA | 333 | 0.207 | 1.453 | 0.37 |
| QAQTGWVQH | | | | |
| PLNGAVHLYA | 334 | 0.489 | 1.452 | 21.26 |
| QAQRTLVQN | | | | |
| SLNGAVHLYA | 335 | 0.559 | 1.451 | 0.09 |
| QAQTMAVQN | | | | |
| PLNGAVHLYA | 336 | 0.707 | 1.447 | 10.23 |
| QAQTQMVQN | | | | |
| PLNGAVHLYA | 337 | 0.663 | 1.442 | 10.52 |
| QAQITPVQN | | | | |
| PLNGAVHLYA | 338 | 0.199 | 1.434 | 0.09 |
| QAQTVWVQK | | | | |
| PLNGAVHLYA | 339 | 0.584 | 1.423 | 13.97 |
| QAQRSAVQN | | | | |
| PLNGAVHLYA | 340 | 0.332 | 1.420 | 99.87 |
| QAQTASVQN | | | | |
| PLNGAVHLYA | 341 | 0.536 | 1.417 | 11.22 |
| QAQTMGVQN | | | | |
| PLNGAVHLYA | 342 | 0.256 | 1.414 | 0.28 |
| QAQTGGVQH | | | | |
| PLNGAVHLYA | 343 | 0.415 | 1.412 | 36.36 |
| QAQVQSVQN | | | | |
| PLNGAVHLYA | 344 | 0.324 | 1.411 | 500.1 |
| QAQTGGVQN | | | | |
| SLNGAVHLYA | 345 | 0.471 | 1.411 | 0.09 |
| QAQTAPVQN | | | | |
| PLNGAVHLYA | 346 | 0.680 | 1.410 | 16.68 |
| QAQISPVQN | | | | |
| PLNGAVHLYA | 347 | 0.345 | 1.409 | 0.09 |
| QPQTGWVKN | | | | |
| PLNGAVHLYA | 348 | 0.242 | 1.409 | 0.14 |
| QAQTGSAQN | | | | |
| PLNGAVHLYA | 349 | 0.474 | 1.393 | 2.62 |
| QAQTGWAQN | | | | |
| PLNGAVHLYA | 350 | 0.383 | 1.392 | 0.09 |
| QAQTMSV?T | | | | |
| PLNGSVHLYA | 351 | 0.649 | 1.391 | 12.29 |
| QAQTAWVQN | | | | |
| PLNGAVHLYA | 352 | 0.410 | 1.387 | 8.13 |
| QAQVGGVQN | | | | |
| PLNGAVHLYA | 353 | 0.496 | 1.387 | 0.09 |
| KAQTSPVQN | | | | |
| PLNGAVHLYA | 354 | 0.768 | 1.381 | 0.09 |
| QAQLAPVQT | | | | |
| PLDGAVHLYA | 355 | 0.901 | 1.375 | 0.09 |
| QAQTALVQN | | | | |
| PLNGAVHLYA | 356 | 0.594 | 1.368 | 58.98 |
| QAQTALVQN | | | | |
| PLNGAVHLYA | 357 | 0.470 | 1.366 | 19.63 |
| QAQLAGVQN | | | | |
| PLNGAVHLYA | 358 | 0.613 | 1.365 | 9.53 |
| QAQRTAVQN | | | | |
| PLNGAVHLYA | 359 | 0.540 | 1.363 | 22.15 |
| QAQRSPVQN | | | | |
| PLNGAVHLYA | 360 | 0.513 | 1.360 | 39.82 |
| QAQTLAVQN | | | | |
| PLNGAVHLYA | 361 | 0.322 | 1.351 | 5.42 |
| QAQLAHVQN | | | | |
| PLNGAVHLYA | 362 | 0.352 | 1.348 | 36.69 |
| QAQTSLVQN | | | | |
| PLNGAVHLYA | 363 | 0.548 | 1.347 | 30.75 |
| QAQRLSVQN | | | | |
| PLNGAVHLYD | 364 | 0.406 | 1.344 | 0.09 |
| QAQLSPVQN | | | | |
| PLNGAVHLYA | 365 | 0.424 | 1.339 | 13.97 |
| QAQLMGVQN | | | | |
| PLNGSVHLYA | 366 | 0.147 | 1.336 | 1.03 |
| QAQTGWVQT | | | | |
| PLNGAVHLYA | 367 | 0.588 | 1.335 | 11.26 |
| QAQSMQVQN | | | | |
| PLNGGVHLYA | 368 | 0.483 | 1.334 | 0.14 |
| QAQTGWFQN | | | | |
| PLNGAVHLYA | 369 | 0.834 | 1.326 | 14.02 |
| QAQTQTVQN | | | | |
| PLDGAVHLYS | 370 | 0.860 | 1.323 | 9.44 |
| QAQTGWVQN | | | | |
| PLNGAVHLYA | 371 | 0.325 | 1.319 | 0.14 |
| QAQTGWEQN | | | | |
| PLNGAVHLYA | 372 | 0.487 | 1.317 | 29.44 |
| QAQVGSVQN | | | | |
| PLNGAVHLYA | 373 | 0.339 | 1.317 | 24.86 |
| QAQVSGVQN | | | | |
| PLNGAVHLYA | 374 | 0.767 | 1.312 | 13.04 |
| QAQVMAVQN | | | | |
| PLNGAVHLYA | 375 | 0.814 | 1.309 | 23.37 |
| QAQIGGVQN | | | | |
| PLNGAVHLYA | 376 | 0.841 | 1.301 | 5.47 |
| QAQIAGVQN | | | | |
| PLNGAVHLYA | 377 | 0.200 | 1.297 | 0.09 |
| KAQTVSVQN | | | | |
| PLNGAVHLYS | 378 | 0.838 | 1.297 | 4.3 |
| QAQTGRVQN | | | | |
| PLNGAVHLYA | 379 | 0.826 | 1.296 | 7.34 |
| QAQLSHVQN | | | | |
| PLNGAVHLYA | 380 | 0.865 | 1.288 | 4.77 |
| QAQVQTVQN | | | | |
| SLDGAVHLYA | 381 | 0.875 | 1.287 | 61.08 |
| QAQTGWVQN | | | | |
| PLNGAVHLYA | 382 | 0.326 | 1.287 | 0.09 |
| QPQTGWDQN | | | | |
| PLNGAVHLYA | 383 | 0.564 | 1.284 | 11.36 |
| QAQRNSVQN | | | | |
| PLNGAVHLYA | 384 | 0.533 | 1.283 | 57.16 |
| QAQTLPVQN | | | | |
| PLNGAVHLYA | 385 | 0.569 | 1.282 | 5.09 |
| QAQTKQVQN | | | | |
| PLNGSVHLYA | 386 | 0.144 | 1.279 | 972 |
| QAQTGWVQN | | | | |
| PLNGAVHLYA | 387 | 0.593 | 1.278 | 11.17 |
| QAQLGQVQN | | | | |
| SLNGAVHLYA | 388 | 0.684 | 1.277 | 19.35 |
| QAQTGRVQN | | | | |
| PLDGAVHLYA | 389 | 0.647 | 1.275 | 263.1 |
| QAQTGWVQN | | | | |
| PLNGSVHLYA | 390 | 0.181 | 1.273 | 0.19 |
| QAQTGWAQN | | | | |
| TLNGAVHLYA | 391 | 0.405 | 1.266 | 0.09 |
| QAQVASVQN | | | | |
| PLNGAVHLYA | 392 | 0.733 | 1.261 | 2.85 |
| QAQNMQVQN | | | | |
| PLNGAVHLYA | 393 | 0.863 | 1.258 | 3.18 |
| QAQNVQVQN | | | | |
| PLNGAVHLYA | 394 | 0.299 | 1.250 | 0.14 |
| QAQTGSVQI | | | | |
| PLNGTVHLYA | 395 | 0.840 | 1.249 | 15.75 |
| QAQTGGVQN | | | | |
| PLNGAVHLYA | 396 | 0.805 | 1.248 | 0.09 |
| KAQVSPVQN | | | | |
| PLNGAVHLYA | 397 | 0.765 | 1.241 | 6.4 |
| QAQRGGVQN | | | | |
| PLNGGVHLYA | 398 | 0.335 | 1.240 | 25.94 |
| QAQTGLVQN | | | | |
| PLNGAVHLYA | 399 | 0.542 | 1.237 | 33.32 |
| QAQVMSVQN | | | | |
| PLNGAVHLYA | 400 | 0.401 | 1.235 | 15.05 |
| QAQTTGVQN | | | | |
| PLNGAVHLYA | 401 | 0.375 | 1.229 | 0.09 |
| QAQLSPVQK | | | | |
| SLNGAVHLYA | 402 | 0.677 | 1.226 | 0.09 |
| QAQTAAVQN | | | | |
| PINGAVHLYA | 403 | 0.351 | 1.223 | 0.14 |
| QAQTSPVQN | | | | |
| PLNGAVHLYA | 404 | 0.691 | 1.220 | 15.28 |
| QAQLSRVQN | | | | |
| PLNGAVHLYA | 405 | 0.259 | 1.213 | 0.09 |
| QAQVSSVQK | | | | |
| PLNGAVHLYA | 406 | 0.768 | 1.212 | 0.09 |
| QAQTAPVQT | | | | |
| PLNGAVHLYA | 407 | 0.740 | 1.206 | 7.9 |
| QAQMAPVQN | | | | |
| PLNGAVHLYA | 408 | 0.499 | 1.202 | 7.06 |
| QAQILGVQN | | | | |
| PLNGAVHLYA | 409 | 0.216 | 1.198 | 0.14 |
| QAQTASVQT | | | | |
| PLNGAVHLYA | 410 | 0.267 | 1.196 | 0.23 |
| QAQTGSLQN | | | | |
| PLNGAVHLYA | 411 | 0.638 | 1.196 | 28.79 |
| QAQTGTVQN | | | | |
| PLNGGVHLYA | 412 | 0.578 | 1.193 | 565.1 |
| QAQTGWVQN | | | | |
| PLNGAVHLYA | 413 | 0.237 | 1.183 | 0.89 |
| QAQTGSVQT | | | | |
| PLNGAVHLYA | 414 | 0.353 | 1.171 | 0.09 |
| QAQTSSVQT | | | | |
| PLNGAVHLYA | 415 | 0.414 | 1.167 | 10.84 |
| QAQTSHVQN | | | | |
| PLNGGVHLYA | 416 | 0.561 | 1.166 | 0.28 |
| QAQTGWDQN | | | | |
| PLNGAVHLYA | 417 | 0.753 | 1.165 | 3.55 |
| QAQRIGVQN | | | | |
| TLNGAVHLYA | 418 | 0.771 | 1.164 | 0.09 |
| QAQTTSVQN | | | | |
| PLNGAVHLYA | 419 | 0.347 | 1.158 | 0.14 |
| QAQTGWGQT | | | | |
| PLNGAVHLYA | 420 | 0.549 | 1.158 | 14.3 |
| QAQSAMVQN | | | | |
| PLNGAVHLYA | 421 | 0.510 | 1.156 | 23.23 |
| QAQTSMVQN | | | | |
| PLNGAVHLYA | 422 | 0.781 | 1.148 | 13.09 |
| QAQSMGVQN | | | | |
| PLNGAVHLYA | 423 | 0.568 | 1.145 | 27.62 |
| QAQSMSVQN | | | | |
| PLNGAVHLYA | 424 | 0.442 | 1.145 | 94.03 |
| QAQTSSVQN | | | | |
| PLNGAVHLYA | 425 | 0.620 | 1.143 | 30.52 |
| QAQTSGVQN | | | | |
| PLNGAVHLYA | 426 | 0.557 | 1.141 | 22.9 |
| QAQTGAVQN | | | | |
| PLNGAVHLYA | 427 | 0.627 | 1.140 | 14.02 |
| QAQVNSVQN | | | | |
| PLNGAVHLYA | 428 | 0.804 | 1.139 | 12.48 |
| QAQVAGVQN | | | | |
| PLNGAVHLYA | 429 | 0.710 | 1.139 | 27.01 |
| QAQIGSVQN | | | | |
| PLDGAVHVYA | 430 | 0.818 | 1.132 | 9.49 |
| QAQTGWVQN | | | | |
| TLNGAVHLYA | 431 | 0.474 | 1.131 | 0.09 |
| QAQTTPVQN | | | | |
| PLNGAVHLYA | 432 | 0.442 | 1.131 | 41.64 |
| QAQLGSVQN | | | | |
| PLNGAVHLYA | 433 | 0.807 | 1.130 | 7.06 |
| QAQVNGVQN | | | | |
| QLNGAVHLYA | 434 | 0.857 | 1.127 | 0.19 |
| QAQLSSVQN | | | | |
| PLNGAVHLYA | 435 | 0.652 | 1.127 | 7.62 |
| QAQLTAVQN | | | | |
| PLNGAVHLYA | 436 | 0.892 | 1.125 | 3.22 |
| QAQVQNVQN | | | | |
| PLNGAVHLYA | 437 | 0.737 | 1.117 | 14.63 |
| QAQTKSVQN | | | | |
| PLNGAVHLYA | 438 | 0.847 | 1.117 | 16.64 |
| QAQSVGVQN | | | | |
| QLNGAVHLYA | 439 | 0.413 | 1.116 | 0.09 |
| QAQLGPVQN | | | | |
| PLNGAVHLYA | 440 | 0.274 | 1.107 | 0.47 |
| QAQTAWVQT | | | | |
| PLNGAVHLYA | 441 | 0.651 | 1.099 | 11.54 |
| QAQNASVQN | | | | |
| PLNGAVHLYA | 442 | 0.661 | 1.098 | 45.57 |
| QAQTSAVQN | | | | |
| ALNGAVHLYA | 443 | 0.530 | 1.097 | 0.09 |
| QAQLAAVQN | | | | |
| PLNGAVHLYD | 444 | 0.721 | 1.097 | 0.09 |
| QAQVSPVQN | | | | |
| PLNGAVHLYA | 445 | 0.442 | 1.095 | 0.09 |
| QAQTMSVKN | | | | |
| PLNGAVHLYA | 446 | 0.650 | 1.092 | 7.7 |
| QAQTANVQN | | | | |
| PLNGAVHLYA | 447 | 0.358 | 1.092 | 5.19 |
| QAQTGWFQN | | | | |
| PLNGNVHLYA | 448 | 0.392 | 1.090 | 74.03 |
| QAQTGWVQN | | | | |
| PLNGSVHLYA | 449 | 0.195 | 1.087 | 0.23 |
| QAQTGWVQS | | | | |
| PLNGAVHLYA | 450 | 0.279 | 1.081 | 0.09 |
| QAQTGGVLN | | | | |
| PLNGAVHLYA | 451 | 0.888 | 1.081 | 16.45 |
| QAQLTSVQN | | | | |
| PLNGAVHLYA | 452 | 0.176 | 1.079 | 19.3 |
| QAQTGWVQT | | | | |
| PLNGAVHLYA | 453 | 0.804 | 1.078 | 10.7 |
| QAQRSQVQN | | | | |
| PLNGAVHIYA | 454 | 0.840 | 1.074 | 0.09 |
| QAQVSPVQN | | | | |
| PLNGSVHLYA | 455 | 0.130 | 1.062 | 0.37 |
| QAQTGWFQN | | | | |
| PLNGAVHLYA | 456 | 0.863 | 1.060 | 3.13 |
| QAQRIPVQN | | | | |
| QLNGAVHLYA | 457 | 0.718 | 1.054 | 0.09 |
| QAQLVPVQN | | | | |
| PLNGAVHLYA | 458 | 0.198 | 1.052 | 2.06 |
| QAQTGWVQD | | | | |
| PLNGAVHLYA | 459 | 0.357 | 1.051 | 0.09 |
| KAQVSSVQN | | | | |
| PLNGAVHLYA | 460 | 0.721 | 1.051 | 11.54 |
| QAQRVEVQN | | | | |
| PLNGAVHLYA | 461 | 0.553 | 1.048 | 56.6 |
| QAQVLPVQN | | | | |
| PLNGSVHLYA | 462 | 0.194 | 1.044 | 0.28 |
| QAQTGWVRN | | | | |
| PLNGTVHLYA | 463 | 0.648 | 1.040 | 0.09 |
| QAQSSPVQN | | | | |
| PLNGAVHLYA | 464 | 0.301 | 1.039 | 0.42 |
| QAQTGGVQK | | | | |
| PLNGAVHLYA | 465 | 0.727 | 1.039 | 14.63 |
| QAQSVAVQN | | | | |
| QLNGAVHLYA | 466 | 0.815 | 1.030 | 0.09 |
| QAQLSGVQN | | | | |
| PLNGAVHLYA | 467 | 0.384 | 1.026 | 11.26 |
| QAQLQQVQN | | | | |
| PLNGAVHLYA | 468 | 0.547 | 1.025 | 32.06 |
| QAQLSTVQN | | | | |
| PLNGAVHLYA | 469 | 0.813 | 1.025 | 18.09 |
| QAQSAAVQN | | | | |
| SLNGAVHLYA | 470 | 0.774 | 1.014 | 0.14 |
| QAQVSAVQN | | | | |
| PLNGAVHLYA | 471 | 0.432 | 1.013 | 20.47 |
| QAQRTSVQN | | | | |
| PLNGAVHLYA | 472 | 0.877 | 1.012 | 5.47 |
| QAQTQNVQN | | | | |
| PLNGAVHLYA | 473 | 0.877 | 1.007 | 4.81 |
| QAQVNAVQN | | | | |
| PLNGAVHLYA | 474 | 0.585 | 1.006 | 0.09 |
| QAQTVAVQT | | | | |
| PLNGAVHLYA | 475 | 0.487 | 1.005 | 20.75 |
| QAQLMSVQN | | | | |
| PLNGAVHLYA | 476 | 0.179 | 1.000 | 15655 |
| QAQTGWVQN | | | | |
| PLNGAVHLYA | 477 | 0.354 | 0.999 | 0.09 |
| HAQTGWVQH | | | | |
| PLNGAVHLYA | 478 | 0.283 | 0.997 | 7.48 |
| QAQTGWVQH | | | | |
| PLNGAVHHYA | 479 | 0.408 | 0.993 | 0.09 |
| QAQTMSVQN | | | | |
| PLNGAVHLYA | 480 | 0.228 | 0.978 | 3.08 |
| QAQTGWVQS | | | | |
| PLNGAVHLYD | 481 | 0.409 | 0.976 | 0.09 |
| QAQTTPVQN | | | | |
| PLNGAVHLYA | 482 | 0.837 | 0.973 | 3.69 |
| QAQTMMVQN | | | | |
| PLNGAVHLYA | 483 | 0.293 | 0.971 | 0.14 |
| QAQTGGVQS | | | | |
| PLNGAVNLYA | 484 | 0.499 | 0.969 | 0.14 |
| QAQTSPVQN | | | | |
| ALNGAVHLYA | 485 | 0.322 | 0.968 | 47.95 |
| QAQTGLVQN | | | | |
| ALNGAVHLYA | 486 | 0.247 | 0.964 | 0.09 |
| QAQVATVQN | | | | |
| PLNGAVHLYA | 487 | 0.258 | 0.959 | 0.23 |
| QAQTGSFQN | | | | |
| PLNGAVHLYA | 488 | 0.422 | 0.958 | 27.01 |
| QAQRSVVQN | | | | |
| PLNGAVHLYA | 489 | 0.224 | 0.957 | 0.65 |
| QAQTGSVQK | | | | |
| PLNGAVHLYA | 490 | 0.503 | 0.954 | 16.31 |
| QAQTQLVQN | | | | |
| PLNGAVHLYA | 491 | 0.252 | 0.954 | 0.19 |
| QAQTGGVHN | | | | |
| PLNGAVHLYA | 492 | 0.328 | 0.953 | 11.92 |
| QAQRTPVQN | | | | |
| PLNGAVHLYA | 493 | 0.852 | 0.952 | 5.33 |
| QAQRQQVQN | | | | |
| PLNGAVHLYA | 494 | 0.321 | 0.952 | 0.19 |
| QAQTGSVRN | | | | |
| PLNGAVHLYA | 495 | 0.758 | 0.946 | 11.87 |
| QAQVQGVQN | | | | |
| TLNGAVHLYA | 496 | 0.854 | 0.942 | 0.14 |
| QAQVSPVQN | | | | |
| PLNGAVHLYA | 497 | 0.205 | 0.942 | 0.23 |
| QAQPGWVQT | | | | |
| PLNGAVHLYA | 498 | 0.407 | 0.941 | 17.25 |
| QAQSTQVQN | | | | |
| PLNGSVHLYA | 499 | 0.247 | 0.939 | 0.09 |
| QAQTGWVEN | | | | |
| PLNGAVHLYA | 500 | 0.267 | 0.934 | 22.29 |
| QAQQSPVQN | | | | |
| PLNGAVHLYA | 501 | 0.517 | 0.934 | 8.23 |
| QAQRYSVQN | | | | |
| PLNGAVHLYA | 502 | 0.267 | 0.930 | 9.77 |
| QAQTGWDQN | | | | |
| PLNGAVHLYA | 503 | 0.774 | 0.930 | 4.67 |
| QAQTQRVQN | | | | |
| ALNGAVHLYA | 504 | 0.330 | 0.926 | 0.23 |
| QAQTGWVRN | | | | |
| PLNGAVHLYA | 505 | 0.370 | 0.923 | 171 |
| QPQTGWVQN | | | | |
| ALNGAVHLYA | 506 | 0.516 | 0.920 | 0.09 |
| QAQVSGVQN | | | | |
| PLNGAVHLYA | 507 | 0.813 | 0.920 | 17.01 |
| QAQSAGVQN | | | | |
| PLNGAVHLYA | 508 | 0.734 | 0.918 | 0.09 |
| QAQSAPVQT | | | | |
| PLNGAVHLYA | 509 | 0.499 | 0.914 | 13.97 |
| QAQRQSVQN | | | | |
| PLNGAVHLYA | 510 | 0.591 | 0.906 | 20.42 |
| QAQSQPVQN | | | | |
| PLNGAVHLYA | 511 | 0.570 | 0.906 | 0.09 |
| QAQVASVKN | | | | |
| PLNGAVHLYA | 512 | 0.403 | 0.904 | 0.09 |
| QAQTAWVRN | | | | |
| SLNGAVHLYA | 513 | 0.491 | 0.904 | 0.09 |
| QAQTMQVQN | | | | |
| PLNGAVNLYA | 514 | 0.664 | 0.902 | 0.09 |
| QAQSSPVQN | | | | |
| PLNGAVHLYA | 515 | 0.318 | 0.901 | 0.23 |
| QAQTGGGQN | | | | |
| PLNGAVHLYD | 516 | 0.515 | 0.898 | 0.09 |
| QAQVASVQN | | | | |
| PLNGAVHLYA | 517 | 0.709 | 0.897 | 45.94 |
| QAQSTSVQN | | | | |
| PLNGTVHLYA | 518 | 0.403 | 0.894 | 0.23 |
| QAQTGWVQH | | | | |
| QLNGAVHLYA | 519 | 0.718 | 0.892 | 0.42 |
| QAQTSSVQN | | | | |
| PLDGAVHLYA | 520 | 0.613 | 0.892 | 0.09 |
| QAQTGWVHN | | | | |
| PLNGTVHLYA | 521 | 0.397 | 0.888 | 0.33 |
| QAQTGWVQK | | | | |
| PLNGAVHLYA | 522 | 0.369 | 0.888 | 20.28 |
| QAQVLGVQN | | | | |
| PLNGAVHLYA | 523 | 0.640 | 0.887 | 5.7 |
| QAQNQPVQN | | | | |
| PLNGAVHLYA | 524 | 0.605 | 0.885 | 21.08 |
| QAQLGTVQN | | | | |
| PLNGAVHLYA | 525 | 0.637 | 0.882 | 7.57 |
| QAQRAGVQN | | | | |
| PVNGAVHLYA | 526 | 0.837 | 0.882 | 42.25 |
| QAQTGLVQN | | | | |
| PLNGGVHLYA | 527 | 0.529 | 0.881 | 0.33 |
| QAQTGWVQH | | | | |
| PLNGAVHLYA | 528 | 0.677 | 0.879 | 116.4 |
| QAQTGRVQN | | | | |
| PLNGAVHLYA | 529 | 0.266 | 0.876 | 0.56 |
| QAQTGGVKN | | | | |
| PLNGAVHLYA | 530 | 0.251 | 0.874 | 0.14 |
| QAQTAWLQN | | | | |
| PLNGAVHLYA | 531 | 0.269 | 0.870 | 0.14 |
| QAQTRWVQK | | | | |
| PLNGAVHLYA | 532 | 0.699 | 0.858 | 0.09 |
| QAQLAPVKN | | | | |
| PLNGAVHHYA | 533 | 0.390 | 0.855 | 0.09 |
| QAQTSSVQN | | | | |
| PLNGAVHLYA | 534 | 0.402 | 0.851 | 0.14 |
| QAQTGSVQD | | | | |
| PLNGAVHLYA | 535 | 0.557 | 0.849 | 27.67 |
| QAQTGMVQN | | | | |
| PLNGAVHLYA | 536 | 0.647 | 0.848 | 15.14 |
| QAQLSNVQN | | | | |
| PLNGAVHLYA | 537 | 0.502 | 0.844 | 14.39 |
| QAQRLPVQN | | | | |
| PLNGAVHLYA | 538 | 0.782 | 0.842 | 7.52 |
| QAQRQGVQN | | | | |
| PLNGAVHLYA | 539 | 0.563 | 0.839 | 0.09 |
| QAQSTPVQT | | | | |
| QLNGNVHLYA | 540 | 0.844 | 0.838 | 5.56 |
| QAQTGWVQN | | | | |
| PLNGGVHLYA | 541 | 0.559 | 0.835 | 0.84 |
| QAQTGWVQT | | | | |
| PLNGAVHLYA | 542 | 0.470 | 0.833 | 0.09 |
| QAQTTPVKN | | | | |
| PLNGAVHLYA | 543 | 0.700 | 0.832 | 18.65 |
| QAQRLTVQN | | | | |
| PLNGAVHLYA | 544 | 0.373 | 0.830 | 7.52 |
| QAQTLRVQN | | | | |
| PLNGAVHLYA | 545 | 0.742 | 0.830 | 7.34 |
| QAQSAFVQN | | | | |
| SLNGAVHLYA | 546 | 0.586 | 0.824 | 0.09 |
| QAQTNSVQN | | | | |
| PLNGAVHLYA | 547 | 0.658 | 0.824 | 6.92 |
| QAQSVQVQN | | | | |
| PLDGAVHLYA | 548 | 0.568 | 0.823 | 0.09 |
| QAQTAAVQN | | | | |
| SLNGAVHLYA | 549 | 0.532 | 0.821 | 0.09 |
| QAQLMPVQN | | | | |
| PLDGAVHLYA | 550 | 0.621 | 0.820 | 0.47 |
| QAQTGWVQT | | | | |
| PLNGAVHLYA | 551 | 0.672 | 0.819 | 49.77 |
| QAQLLPVQN | | | | |
| PLNGAVHLYA | 552 | 0.738 | 0.815 | 6.64 |
| QAQRTQVQN | | | | |
| PLNGAVHLYA | 553 | 0.254 | 0.813 | 0.79 |
| QAQTGSDQN | | | | |
| PLNGAVHLYA | 554 | 0.430 | 0.808 | 0.09 |
| QAQVASDQN | | | | |
| PLNGAVNLYA | 555 | 0.744 | 0.805 | 0.09 |
| QAQLAPVQN | | | | |
| PLNGSVHLYA | 556 | 0.160 | 0.804 | 0.37 |
| QAQTGWLQN | | | | |
| PLNGTVHLYA | 557 | 0.253 | 0.801 | 500.6 |
| QAQTGWVQN | | | | |
| PLNGAVHLYA | 558 | 0.857 | 0.801 | 0.14 |
| QAQVSPVKN | | | | |
| PLNGAVHLYA | 559 | 0.480 | 0.801 | 1.22 |
| QAQLPPVQN | | | | |
| PLNGAVHLYA | 560 | 0.521 | 0.794 | 0.14 |
| QAQSSPVQT | | | | |
| PLNGAVHLYA | 561 | 0.585 | 0.790 | 8.88 |
| QAQAQPVQN | | | | |
| PLNGDVHLYA | 562 | 0.434 | 0.789 | 0.09 |
| QAQTTSVQN | | | | |
| PLNGAVHLYA | 563 | 0.392 | 0.788 | 0.75 |
| QAQTPQVQN | | | | |
| PLNGAVHLYA | 564 | 0.571 | 0.787 | 29.35 |
| QAQTSWVQN | | | | |
| PLNGAVHLYA | 565 | 0.254 | 0.784 | 0.51 |
| QAQTGGDQN | | | | |
| PLNGAVHLYA | 566 | 0.547 | 0.782 | 0.14 |
| QAQLSPVKN | | | | |
| PLNGAVHLYA | 567 | 0.603 | 0.782 | 0.09 |
| QAQSSPVKN | | | | |
| PLNGAVHLYA | 568 | 0.727 | 0.781 | 8.41 |
| QAQNTTVQN | | | | |
| PLDGAVHLYA | 569 | 0.716 | 0.780 | 0.19 |
| QAQTGWVQH | | | | |
| PLNGAVHLYA | 570 | 0.823 | 0.773 | 6.31 |
| QAQTTRVQN | | | | |
| PLDGAVHLYA | 571 | 0.722 | 0.767 | 0.09 |
| QAQTGWLQN | | | | |
| PLNGSVHLYA | 572 | 0.681 | 0.757 | 8.32 |
| QPQTGWVQN | | | | |
| PLNGAVHLYS | 573 | 0.794 | 0.755 | 25.1 |
| QAQTGLVQN | | | | |
| PLNGAVHLYA | 574 | 0.654 | 0.755 | 14.16 |
| QAQTQWVQN | | | | |
| PLNGSVHLYA | 575 | 0.187 | 0.754 | 0.33 |
| QAQTGWVQI | | | | |
| PLNGAVHLYA | 576 | 0.259 | 0.753 | 0.28 |
| QAQTGSVHN | | | | |
| ALNGAVHLYA | 577 | 0.367 | 0.751 | 1129 |
| QAQTGWVQN | | | | |
| PLNGTVHLYA | 578 | 0.224 | 0.749 | 0.14 |
| QAQTGWVRN | | | | |
| PLNGAVHLYA | 579 | 0.240 | 0.749 | 0.23 |
| QAQTGGLQN | | | | |
| SLNGAVHLYA | 580 | 0.712 | 0.748 | 0.09 |
| QAQVSGVQN | | | | |
| PLNGAVHLYA | 581 | 0.404 | 0.747 | 0.37 |
| QAQTAWVQK | | | | |
| PLNGAVHLYA | 582 | 0.660 | 0.747 | 0.19 |
| QAQTGRVQT | | | | |
| TLNGAVHLYA | 583 | 0.754 | 0.739 | 0.09 |
| QAQSAPVQN | | | | |
| PLNGAVHLYD | 584 | 0.449 | 0.738 | 0.09 |
| QAQTVAVQN | | | | |
| QLNGAVHLYA | 585 | 0.892 | 0.735 | 48.7 |
| QAQTGSVQN | | | | |
| PLNGAVHLYA | 586 | 0.858 | 0.733 | 5.37 |
| QAQNTQVQN | | | | |
| PLNGAVHLYA | 587 | 0.512 | 0.729 | 5.05 |
| QAQTGWLQN | | | | |
| PINGAVHLYA | 588 | 0.684 | 0.721 | 45.57 |
| QAQTGLVQN | | | | |
| PLDGAVHLYA | 589 | 0.600 | 0.719 | 0.09 |
| QAQTGWVQI | | | | |
| PLNGSVHLYA | 590 | 0.369 | 0.713 | 0.09 |
| QAQTGSVQT | | | | |
| PLNGAVQLYA | 591 | 0.460 | 0.711 | 0.09 |
| QAQTSSVQN | | | | |
| PLNGAVHLYA | 592 | 0.658 | 0.707 | 5.61 |
| QAQTYAVQN | | | | |
| PLNGAVHLYA | 593 | 0.575 | 0.703 | 81.37 |
| QAQTLSVQN | | | | |
| PLNGAVHLYA | 594 | 0.874 | 0.703 | 12.15 |
| QAQNLPVQN | | | | |
| PLNGAVHLYA | 595 | 0.328 | 0.702 | 0.09 |
| QAQTSSDQN | | | | |
| PLNGAVHLYA | 596 | 0.736 | 0.702 | 23.93 |
| QAQATSVQN | | | | |
| TLNGAVHLYA | 597 | 0.353 | 0.701 | 0.23 |
| QAQLSPVQN | | | | |
| PLNGAVHLYA | 598 | 0.271 | 0.700 | 0.14 |
| QAQTAWFQN | | | | |
| TLNGAVHLYA | 599 | 0.801 | 0.700 | 0.09 |
| QAQVTPVQN | | | | |
| TLNGAVHLYA | 600 | 0.202 | 0.696 | 0.09 |
| QAQTAAVQN | | | | |
| PLNGAVHLYA | 601 | 0.801 | 0.693 | 7.76 |
| QAQATQVQN | | | | |
| RLDGAVHLYA | 602 | 0.861 | 0.693 | 8.37 |
| QAQTGWVQN | | | | |
| QLNGAVHLYA | 603 | 0.840 | 0.691 | 0.09 |
| QAQTGWVEN | | | | |
| PLNGAVHLYA | 604 | 0.278 | 0.691 | 0.19 |
| QAQVSSVKN | | | | |
| PLNGAVHLYA | 605 | 0.582 | 0.690 | 94.87 |
| QAQLSSVQN | | | | |
| PLNGAVHLYA | 606 | 0.209 | 0.689 | 0.33 |
| QAQTGSGQN | | | | |
| PLNGAVHLYA | 607 | 0.441 | 0.686 | 0.09 |
| QAQLQPVQT | | | | |
| PINGAVHLYA | 608 | 0.805 | 0.686 | 0.09 |
| QAQLSSVQN | | | | |
| PINGAVHLYA | 609 | 0.313 | 0.684 | 0.09 |
| QAQTVAVQN | | | | |
| PLNGAVHLYA | 610 | 0.546 | 0.680 | 0.09 |
| QAQVSAVKN | | | | |
| SLNGAVHLYA | 611 | 0.461 | 0.680 | 0.23 |
| QAQTVAVQN | | | | |
| PLNGAVHLYA | 612 | 0.882 | 0.680 | 22.29 |
| QAQTQAVQN | | | | |
| QLNGAVHLYA | 613 | 0.398 | 0.679 | 0.28 |
| QAQTAQVQN | | | | |
| PLNGAVHLYD | 614 | 0.309 | 0.676 | 0.14 |
| QAQTMSVQN | | | | |
| PLNGAVHLYA | 615 | 0.341 | 0.675 | 0.19 |
| QPQTGWVQK | | | | |
| PLNGAVHLYA | 616 | 0.855 | 0.672 | 30.47 |
| QAQVMPVQN | | | | |
| PLNGAVHLYA | 617 | 0.208 | 0.669 | 0.19 |
| QAQTVSVQK | | | | |
| PLNGAVHLYA | 618 | 0.410 | 0.664 | 0.09 |
| QAQTAWAQN | | | | |
| PLNGAVHLYA | 619 | 0.764 | 0.664 | 12.06 |
| QAQNALVQN | | | | |
| TLNGAVHLYA | 620 | 0.217 | 0.663 | 0.09 |
| QAQVSAVQN | | | | |
| PLKGAVHLYA | 621 | 0.611 | 0.663 | 0.09 |
| QAQTTPVQN | | | | |
| QLNGSVHLYA | 622 | 0.776 | 0.657 | 96.83 |
| QAQTGWVQN | | | | |
| SLNGAVHLYA | 623 | 0.307 | 0.650 | 0.09 |
| QAQVATVQN | | | | |
| PLNGAVHLYA | 624 | 0.876 | 0.650 | 9.39 |
| QAQRMLVQN | | | | |
| PLNGAVHLYA | 625 | 0.589 | 0.649 | 0.09 |
| QAQTVAVKN | | | | |
| PLNGAVHLYD | 626 | 0.523 | 0.649 | 0.14 |
| QAQTTSVQN | | | | |
| PLNGAVHLYA | 627 | 0.725 | 0.647 | 11.92 |
| QAQRQLVQN | | | | |
| PLNGAVHLYA | 628 | 0.754 | 0.645 | 28.79 |
| QAQTLGVQN | | | | |
| PLNGAVHLYA | 629 | 0.889 | 0.645 | 0.09 |
| QAQLGPVQT | | | | |
| PLNGGVHLYA | 630 | 0.554 | 0.644 | 0.14 |
| QAQTGWVQD | | | | |
| PLNGAVHLYA | 631 | 0.205 | 0.640 | 0.98 |
| QAQTGSVKN | | | | |
| PLNGAVNLYA | 632 | 0.332 | 0.635 | 0.09 |
| QAQLASVQN | | | | |
| PLNGAVHLYD | 633 | 0.307 | 0.634 | 0.14 |
| QAQVSSVQN | | | | |
| PLNGAVHLYA | 634 | 0.355 | 0.632 | 0.14 |
| QAQTMSDQN | | | | |
| PLNGAVHLYA | 635 | 0.337 | 0.630 | 17.48 |
| QAQTGWVQK | | | | |
| PLNGAVHLYA | 636 | 0.203 | 0.630 | 0.09 |
| QAQLASVKN | | | | |
| PLNGGVHLYA | 637 | 0.490 | 0.628 | 0.23 |
| QAQTGWGQN | | | | |
| QLNGSVHLYA | 638 | 0.844 | 0.627 | 0.09 |
| QAQTGWVQT | | | | |
| QLNGAVHLYA | 639 | 0.845 | 0.626 | 0.09 |
| QAQTTGVQN | | | | |
| PLNGAVHLYA | 640 | 0.602 | 0.625 | 39.96 |
| QAQTGFVQN | | | | |
| PLNGAVHLYA | 641 | 0.536 | 0.625 | 42.62 |
| QAQSALVQN | | | | |
| ALNGAVHLYA | 642 | 0.278 | 0.624 | 0.75 |
| QAQTGWDQN | | | | |
| QLNGAVHLYA | 643 | 0.636 | 0.623 | 0.09 |
| QAQISGVQN | | | | |
| QLNGAVHLYA | 644 | 0.520 | 0.623 | 0.14 |
| QAQRGSVQN | | | | |
| PLNGAVHLYA | 645 | 0.270 | 0.622 | 0.19 |
| QAQTGWVKT | | | | |
| PLNGAVHLYA | 646 | 0.554 | 0.619 | 27.62 |
| QAQSQLVQN | | | | |
| PLNGSVHLYA | 647 | 0.202 | 0.617 | 0.33 |
| QAQTGWGQN | | | | |
| QLNGAVHLYA | 648 | 0.632 | 0.616 | 0.14 |
| QAQTGWVPN | | | | |
| PLNGAVHLYA | 649 | 0.305 | 0.615 | 0.33 |
| KAQTGWVKN | | | | |
| PLNGAVHLYA | 650 | 0.164 | 0.615 | 0.09 |
| HAQTGWGQN | | | | |
| ALNGAVHLYA | 651 | 0.330 | 0.613 | 0.61 |
| QAQTGWVQH | | | | |
| PLNGSVHLYA | 652 | 0.585 | 0.612 | 0.14 |
| QAQIASVQN | | | | |
| ALNGAVHLYA | 653 | 0.416 | 0.611 | 0.14 |
| QAQTAMVQN | | | | |
| TLNGAVHLYA | 654 | 0.316 | 0.610 | 0.09 |
| QAQTMAVQN | | | | |
| PHNGAVHLYA | 655 | 0.476 | 0.609 | 0.09 |
| QAQVSSVQN | | | | |
| PLNGAVQLYA | 656 | 0.693 | 0.606 | 0.09 |
| QAQTAPVQN | | | | |
| PLNGSVHLYA | 657 | 0.282 | 0.605 | 0.09 |
| QAQKGSVQN | | | | |
| PLNGAVHLYA | 658 | 0.574 | 0.605 | 39.3 |
| QAQLSAVQN | | | | |
| PINGAVHLYA | 659 | 0.489 | 0.605 | 0.09 |
| QAQVSAVQN | | | | |
| PLNGSVHLYA | 660 | 0.514 | 0.604 | 43.37 |
| QAQTGLVQN | | | | |
| PLNGAVHIYA | 661 | 0.223 | 0.604 | 0.14 |
| QAQTGWFQN | | | | |
| SLNGAVHLYA | 662 | 0.293 | 0.603 | 0.09 |
| QAQIASVQN | | | | |
| PLNGAVHLYA | 663 | 0.220 | 0.601 | 0.14 |
| QEQTVSVQN | | | | |
| PLNGAVHLYA | 664 | 0.737 | 0.601 | 0.09 |
| QAQTMQVQT | | | | |
| HLNGAVHLYA | 665 | 0.338 | 0.600 | 56.78 |
| QAQTGWVQN | | | | |
| PLNGAVHLYA | 666 | 0.400 | 0.600 | 24.02 |
| QAQTGQVQN | | | | |
| QLNGAVHLYA | 667 | 0.596 | 0.599 | 0.19 |
| QAQTGWVQD | | | | |
| PLNGAVHLYD | 668 | 0.526 | 0.599 | 0.09 |
| QAQVAQVQN | | | | |
| PLNGAVHLYA | 669 | 0.515 | 0.598 | 0.19 |
| QAQTSPVKN | | | | |
| PLNGAIHLYA | 670 | 0.383 | 0.595 | 0.09 |
| QAQTSPVQN | | | | |
| PLNGSVHLYA | 671 | 0.578 | 0.595 | 0.19 |
| QAQTAMVQN | | | | |
| PLNGAVHLYA | 672 | 0.370 | 0.594 | 0.09 |
| QAQLSQVQT | | | | |
| PLNGAVHLYA | 673 | 0.310 | 0.594 | 0.19 |
| QAQTGSVLN | | | | |
| PLNGAIHLYA | 674 | 0.428 | 0.593 | 0.09 |
| QAQTASVQN | | | | |
| PLNGAVHLYA | 675 | 0.785 | 0.592 | 6.68 |
| QAQTNGVQN | | | | |
| PLNGSVHLYA | 676 | 0.334 | 0.591 | 0.14 |
| QAQTGWVQY | | | | |
| PLNGALHLYA | 677 | 0.463 | 0.590 | 0.09 |
| QAQTSPVQN | | | | |
| ALNGAVHLYA | 678 | 0.399 | 0.589 | 1.59 |
| QAQTGWVQT | | | | |
| PLNGAVHLYA | 679 | 0.193 | 0.586 | 0.47 |
| QAQTGWVKK | | | | |
| QLNGAVHLYA | 680 | 0.630 | 0.584 | 1450 |
| QAQTGWVQN | | | | |
| PLNGDVHLYA | 681 | 0.630 | 0.580 | 0.09 |
| QAQTVAVQN | | | | |
| PLNGGVHLYA | 682 | 0.501 | 0.580 | 0.47 |
| QAQPGWVQN | | | | |
| PLNGAVHLYA | 683 | 0.897 | 0.579 | 7.66 |
| QAQAAAVQN | | | | |
| PLNGAVHLYA | 684 | 0.618 | 0.579 | 19.72 |
| QAQSAVVQN | | | | |
| TLNGAVHLYA | 685 | 0.646 | 0.578 | 0.09 |
| QAQRSSVQN | | | | |
| PLNGAVHLYA | 686 | 0.214 | 0.578 | 0.14 |
| QAQPGWVQH | | | | |
| PLDGAVHLYA | 687 | 0.214 | 0.577 | 0.09 |
| QAQTLSVQN | | | | |
| PLNGAVHLYA | 688 | 0.310 | 0.575 | 0.19 |
| QAQTASDQN | | | | |
| PLNGAVHLYA | 689 | 0.633 | 0.575 | 53.51 |
| QAQLSGVQN | | | | |
| TLNGAVHLYA | 690 | 0.463 | 0.572 | 0.14 |
| QAQTVAVQN | | | | |
| PLNGAVHLYA | 691 | 0.293 | 0.572 | 0.09 |
| QEQVASVQN | | | | |
| PVNGAVHLYA | 692 | 0.873 | 0.572 | 0.09 |
| QAQTGWAQN | | | | |
| PLNGAVHLYA | 693 | 0.567 | 0.570 | 14.07 |
| QAQSSRVQN | | | | |
| PLNGSVHLYA | 694 | 0.551 | 0.569 | 0.19 |
| QAQLGSVQN | | | | |
| PLNGAVHLYA | 695 | 0.565 | 0.568 | 1.22 |
| QAQSPPVQN | | | | |
| PLNGAVHHYA | 696 | 0.605 | 0.567 | 0.14 |
| QAQTTSVQN | | | | |
| PLNGAVHLYD | 697 | 0.832 | 0.567 | 0.09 |
| QAQSTPVQN | | | | |
| QLNGAVHLYA | 698 | 0.529 | 0.567 | 0.37 |
| QAQTGWVRN | | | | |
| PLNGAVHLYA | 699 | 0.597 | 0.563 | 0.09 |
| QAQVQPVQT | | | | |
| PLNGAVHLYA | 700 | 0.416 | 0.562 | 0.14 |
| QAQTSSVKN | | | | |
| PLNGALHLYA | 701 | 0.301 | 0.560 | 0.09 |
| QAQTASVQN | | | | |
| PLNGAVHHYA | 702 | 0.731 | 0.558 | 0.09 |
| QAQSAPVQN | | | | |
| PLNGSVHLYA | 703 | 0.169 | 0.556 | 0.47 |
| QAQTGWVHN | | | | |
| PLNGAVHLYA | 704 | 0.519 | 0.556 | 0.09 |
| QAQLSPLQN | | | | |
| PLNGAVHLYA | 705 | 0.841 | 0.554 | 0.09 |
| KAQVTPVQN | | | | |
| PLNGAVNLYA | 706 | 0.278 | 0.554 | 0.09 |
| QAQTQPVQN | | | | |
| SLNGAVHLYA | 707 | 0.518 | 0.553 | 92.07 |
| QAQTGLVQN | | | | |
| PLDGSVHLYA | 708 | 0.366 | 0.552 | 0.09 |
| QAQTGGVQN | | | | |
| PLNGAVHLYD | 709 | 0.528 | 0.552 | 0.09 |
| QAQTLPVQN | | | | |
| PLNGAVHLYA | 710 | 0.441 | 0.551 | 0.09 |
| QAQVSQVQK | | | | |
| PLNGAVHLYA | 711 | 0.425 | 0.551 | 13.97 |
| QAQLVGVQN | | | | |
| PLNGAVHLYA | 712 | 0.390 | 0.549 | 0.09 |
| QEQTSSVQN | | | | |
| PLNGAVHIYA | 713 | 0.435 | 0.549 | 0.09 |
| QAQTVAVQN | | | | |
| PLNGAVNLYA | 714 | 0.831 | 0.548 | 0.14 |
| QAQVTPVQN | | | | |
| TLNGAVHLYA | 715 | 0.252 | 0.547 | 0.19 |
| QAQTMSVQN | | | | |
| TLNGAVHLYA | 716 | 0.341 | 0.541 | 0.09 |
| QAQTLAVQN | | | | |
| PINGAVHLYA | 717 | 0.341 | 0.540 | 0.09 |
| QAQVAQVQN | | | | |
| PLNGQVHLYA | 718 | 0.885 | 0.540 | 12.57 |
| QAQTGWVQN | | | | |
| QLNGAVHLYA | 719 | 0.892 | 0.540 | 39.63 |
| QAQTGGVQN | | | | |
| PLNGAVHLYA | 720 | 0.542 | 0.539 | 0.09 |
| QAQTLSVKN | | | | |
| PLNGTVHLYA | 721 | 0.331 | 0.538 | 0.37 |
| QAQTGWDQN | | | | |
| PLNGAVHLYA | 722 | 0.476 | 0.537 | 0.14 |
| QAQTGWFQK | | | | |
| ALNGAVHLYA | 723 | 0.447 | 0.536 | 0.09 |
| QAQTSKVQN | | | | |
| ALNGTVHLYA | 724 | 0.712 | 0.535 | 49.16 |
| QAQTGWVQN | | | | |
| PLNGAVPLYA | 725 | 0.256 | 0.534 | 0.14 |
| QAQTGWVQH | | | | |
| PLNGAVHLYA | 726 | 0.355 | 0.533 | 0.23 |
| QAKTGWVQK | | | | |
| PLNGAVHLYA | 727 | 0.492 | 0.531 | 1.12 |
| QAQTPAVQN | | | | |
| PLNGAVHLYA | 728 | 0.538 | 0.531 | 0.14 |
| QAQTVGVKN | | | | |
| PLNGAVHLYA | 729 | 0.307 | 0.530 | 0.14 |
| QEQTGWFQN | | | | |
| PLNGAVHLYA | 730 | 0.569 | 0.530 | 0.09 |
| QAQKGWDQN | | | | |
| PLNGAVHLYD | 731 | 0.605 | 0.529 | 0.09 |
| QAQTSAVQN | | | | |
| PLDGAVHLYA | 732 | 0.657 | 0.527 | 0.37 |
| QAQTGWVQK | | | | |
| PLNGAVHLYA | 733 | 0.290 | 0.524 | 0.09 |
| QAQTAWVLN | | | | |
| PLNGSVHLYA | 734 | 0.172 | 0.524 | 0.28 |
| QAQTGWVLN | | | | |
| QLNGAVHLYA | 735 | 0.605 | 0.524 | 1.68 |
| QAQTGWVQT | | | | |
| PLNGAVHLYA | 736 | 0.699 | 0.524 | 0.98 |
| QAQVPPVQN | | | | |
| PVNGAVHLYA | 737 | 0.734 | 0.522 | 0.09 |
| QAQVQSVQN | | | | |
| QLNGAVHLYA | 738 | 0.473 | 0.522 | 0.09 |
| QAQTKSVQN | | | | |
| PVNGAVHLYA | 739 | 0.825 | 0.522 | 0.23 |
| QAQTSSVQN | | | | |
| PLNGAVHLYA | 740 | 0.797 | 0.520 | 11.45 |
| QAQATGVQN | | | | |
| TLNGAVHLYA | 741 | 0.553 | 0.518 | 0.09 |
| QAQLSQVQN | | | | |
| PLDGAVHLYA | 742 | 0.486 | 0.517 | 0.37 |
| QAQTVSVQN | | | | |
| SLNGAVHLYA | 743 | 0.421 | 0.514 | 0.09 |
| QAQTKPVQN | | | | |
| PLKGAVHLYA | 744 | 0.705 | 0.514 | 0.09 |
| QAQSAPVQN | | | | |
| PLNGAVHLYA | 745 | 0.275 | 0.514 | 0.19 |
| QAKTGWVKN | | | | |
| PLNGSVHLYA | 746 | 0.680 | 0.513 | 0.09 |
| QAQTLGVQN | | | | |
| PLKGAVHLYA | 747 | 0.626 | 0.512 | 0.09 |
| QAQLAPVQN | | | | |
| PLNGSVHLYA | 748 | 0.207 | 0.512 | 1.17 |
| QAQTGWVQK | | | | |
| PLNGAVHLYA | 749 | 0.295 | 0.511 | 0.28 |
| QAQTGGVQI | | | | |
| PLNGAVHLYA | 750 | 0.440 | 0.510 | 0.37 |
| QPQTGWVQT | | | | |
| PLNGAVHLYA | 751 | 0.196 | 0.508 | 4.02 |
| QAQTGWVLN | | | | |
| PLNGAVHLYD | 752 | 0.611 | 0.507 | 0.14 |
| QAQLTPVQN | | | | |
| QLNGAVHLYA | 753 | 0.558 | 0.507 | 0.28 |
| QAQTATVQN | | | | |
| PLNGAVHLYA | 754 | 0.359 | 0.505 | 0.19 |
| QAQTAWGQN | | | | |
| PLNGAVHLYA | 755 | 0.273 | 0.505 | 6.78 |
| QAQTGWVHN | | | | |
| PLKGAVHLYA | 756 | 0.556 | 0.505 | 0.09 |
| QAQSSPVQN | | | | |
| PLNGAVHLYA | 757 | 0.374 | 0.505 | 0.09 |
| QAQLGSVQT | | | | |
| PLNGAVHLYA | 758 | 0.656 | 0.505 | 7.62 |
| QAQSANVQN | | | | |
| PLNGGVHLYA | 759 | 0.866 | 0.503 | 23.27 |
| QAQTGSVQN | | | | |
| PLNGAVHLYD | 760 | 0.433 | 0.503 | 0.09 |
| QAQRSSVQN | | | | |
| PLNGAVHLYA | 761 | 0.164 | 0.502 | 0.19 |
| QAQTGGVQD | | | | |
| PLNGAVHLYA | 762 | 0.271 | 0.502 | 0.09 |
| QAQTMAVKN | | | | |
| PLNGAVHLYA | 763 | 0.325 | 0.501 | 0.23 |
| QAQTASVKN | | | | |
| PLNGAVHLYA | 764 | 0.531 | 0.501 | 0.14 |
| QAQSSPVQK | | | | |
| PLNGAVHLYA | 765 | 0.275 | 0.499 | 21.68 |
| QAQTGWVKN | | | | |
| ALNGAVHLYA | 766 | 0.735 | 0.499 | 25.05 |
| QAQTGGVQN | | | | |
| PLNGAVHLYA | 767 | 0.676 | 0.498 | 0.09 |
| QAQTGTVQT | | | | |
| PLNGAVHLYA | 768 | 0.476 | 0.495 | 7.43 |
| QAQTGWVQI | | | | |
| PINGAVHLYA | 769 | 0.382 | 0.494 | 0.09 |
| QAQTSLVQN | | | | |
| PLNGAVHIYA | 770 | 0.502 | 0.492 | 0.09 |
| QAQVAQVQN | | | | |
| PLNGAVHLYA | 771 | 0.279 | 0.491 | 0.19 |
| QAQTVWVKN | | | | |
| TLNGAVHLYA | 772 | 0.827 | 0.491 | 0.09 |
| QAQLMPVQN | | | | |
| PLNGAVHIYA | 773 | 0.672 | 0.490 | 0.09 |
| QAQTAPVQN | | | | |
| PLYGAVHLYA | 774 | 0.240 | 0.488 | 0.09 |
| QAQTASVQN | | | | |
| TLNGAVHLYA | 775 | 0.643 | 0.488 | 0.09 |
| QAQLGPVQN | | | | |
| PLDGAVHLYA | 776 | 0.637 | 0.487 | 0.42 |
| QAQTGWVKN | | | | |
| PLKGAVHLYA | 777 | 0.669 | 0.487 | 0.14 |
| QAQVSPVQN | | | | |
| PLNGAVHLYA | 778 | 0.563 | 0.486 | 9.95 |
| QAQSQQVQN | | | | |
| PLNGAVDLYA | 779 | 0.497 | 0.484 | 0.09 |
| QAQLSPVQN | | | | |
| PLNGAVHLYA | 780 | 0.506 | 0.484 | 0.09 |
| QAQVGSVQT | | | | |
| PLNGTVHLYA | 781 | 0.405 | 0.483 | 0.14 |
| QAQTGWAQN | | | | |
| ALNGAVHLYA | 782 | 0.283 | 0.482 | 0.09 |
| QAQTGLVQT | | | | |
| PLNGAVHLYA | 783 | 0.562 | 0.482 | 35.42 |
| QAQSSMVQN | | | | |
| PLNGAVHLYA | 784 | 0.484 | 0.481 | 0.09 |
| KAQTAGVQN | | | | |
| PLNGAVHLYA | 785 | 0.516 | 0.480 | 0.09 |
| HAQTGWVQK | | | | |
| PLNGAVHLYA | 786 | 0.502 | 0.479 | 0.23 |
| QAQTSPVQK | | | | |
| PLNGAVHLYA | 787 | 0.841 | 0.477 | 7.66 |
| QAQAVGVQN | | | | |
| PLNGAVPLYA | 788 | 0.438 | 0.477 | 0.09 |
| QAQTGWGQN | | | | |
| PLNGTVHLYA | 789 | 0.495 | 0.477 | 0.09 |
| QAQLGSVQN | | | | |
| QLNGAVHLYA | 790 | 0.645 | 0.476 | 0.75 |
| QAQTGWVQH | | | | |
| PLNGSVHLYA | 791 | 0.175 | 0.475 | 1.4 |
| QAQTGWVKN | | | | |
| PLNGAVHLYD | 792 | 0.812 | 0.475 | 0.09 |
| QAQVAPVQN | | | | |
| PLNGAVNLYA | 793 | 0.460 | 0.473 | 0.19 |
| QAQVSSVQN | | | | |
| PLNGAVHLYA | 794 | 0.646 | 0.472 | 0.09 |
| QAQTLPVQK | | | | |
| PLNGSVHLYA | 795 | 0.337 | 0.469 | 0.93 |
| QAQTASVQN | | | | |
| ALNGAVHLYA | 796 | 0.294 | 0.468 | 0.37 |
| QAQTGWGQN | | | | |
| PLNGAVHLYA | 797 | 0.286 | 0.468 | 7.48 |
| QAQTGWGQN | | | | |
| PLNGAAHLYA | 798 | 0.451 | 0.467 | 0.09 |
| QAQTSPVQN | | | | |
| PLNGAVHLYA | 799 | 0.646 | 0.465 | 0.14 |
| QAQTGRVQH | | | | |
| PINGAVHLYA | 800 | 0.768 | 0.464 | 0.09 |
| QAQTGWVQS | | | | |
| PLNGAVHLYA | 801 | 0.454 | 0.464 | 2.24 |
| QAQTP SVQN | | | | |
| PLNGAVHLYD | 802 | 0.450 | 0.464 | 0.09 |
| QAQTTAVQN | | | | |
| PLNGNVHLYA | 803 | 0.415 | 0.462 | 0.09 |
| QAQTGWVQK | | | | |
| PLNGAVHLYA | 804 | 0.167 | 0.462 | 2.62 |
| QAQTGWVEN | | | | |
| PLNGAVNLYA | 805 | 0.371 | 0.461 | 0.19 |
| QAQTTPVQN | | | | |
| PLNGAVNLYA | 806 | 0.489 | 0.461 | 0.09 |
| QAQLSQVQN | | | | |
| SLNGAVHLYA | 807 | 0.263 | 0.460 | 0.14 |
| QAQVMSVQN | | | | |
| QLNGAVHLYA | 808 | 0.622 | 0.458 | 0.33 |
| QAQTGWVQS | | | | |
| PINGAVHLYA | 809 | 0.534 | 0.457 | 0.19 |
| QAQTGWFQN | | | | |
| PLNGDVHLYA | 810 | 0.419 | 0.456 | 0.14 |
| QAQVSSVQN | | | | |
| PLNGGVHLYA | 811 | 0.482 | 0.456 | 0.28 |
| QAQTGWVQS | | | | |
| PLNGAVNLYA | 812 | 0.559 | 0.456 | 0.09 |
| QAQRSTVQN | | | | |
| ALNGAVHLYA | 813 | 0.298 | 0.455 | 0.14 |
| QAQTGWVQY | | | | |
| PLNGAVHHYA | 814 | 0.170 | 0.455 | 0.09 |
| QAQTAAVQN | | | | |
| PLNGAVHRYA | 815 | 0.346 | 0.454 | 0.09 |
| QAQTGWVQH | | | | |
| QLNGAVHLYA | 816 | 0.627 | 0.453 | 0.37 |
| QAQTGWVHN | | | | |
| PLNGAVHLYA | 817 | 0.861 | 0.452 | 56.6 |
| QAQRGWVQN | | | | |
| PLNGAVHLYA | 818 | 0.233 | 0.450 | 0.14 |
| QAQTGSVEN | | | | |
| ALNGAVHLYA | 819 | 0.249 | 0.450 | 0.37 |
| QAQTGWVHN | | | | |
| PLNGAVNLYA | 820 | 0.494 | 0.449 | 0.09 |
| QAQTLAVQN | | | | |
| PLNGAVHLYA | 821 | 0.772 | 0.448 | 91.93 |
| QAQSSLVQN | | | | |
| ALNGAVHLYA | 822 | 0.203 | 0.448 | 0.37 |
| QAQTGWLQN | | | | |
| TLNGAVHLYA | 823 | 0.736 | 0.448 | 0.09 |
| QAQTLQVQN | | | | |
| PLNGAVHLYD | 824 | 0.439 | 0.448 | 0.09 |
| QAQVQSVQN | | | | |
| SLNGAVHLYA | 825 | 0.442 | 0.447 | 0.09 |
| QAQVTGVQN | | | | |
| QLNGAVHLYA | 826 | 0.849 | 0.444 | 0.09 |
| QAQSAVVQN | | | | |
| PLNGVVHLYA | 827 | 0.410 | 0.444 | 0.09 |
| QAQTGWVQT | | | | |
| PLNGAVHLYA | 828 | 0.373 | 0.444 | 0.61 |
| QAQTAWVKN | | | | |
| TLNGAVHLYA | 829 | 0.557 | 0.443 | 0.14 |
| QAQTLPVQN | | | | |
| ALNGAVHLYA | 830 | 0.683 | 0.442 | 0.09 |
| QAQTTGVQN | | | | |
| PLNGAVHLYA | 831 | 0.466 | 0.442 | 0.09 |
| KAQTMAVQN | | | | |
| PLNGAVHLYA | 832 | 0.636 | 0.442 | 10.61 |
| QAQTYSVQN | | | | |
| PLNGCVHLYA | 833 | 0.285 | 0.441 | 0.75 |
| QAQTGWVQN | | | | |
| PLNGAVHLYA | 834 | 0.491 | 0.440 | 0.09 |
| QAQLAAVQT | | | | |
| PLNGAVHLYA | 835 | 0.734 | 0.440 | 0.14 |
| QAQTALVKN | | | | |
| PLNGAVHLYA | 836 | 0.392 | 0.439 | 0.14 |
| KAQTVAVQN | | | | |
| PLNGAVHLYA | 837 | 0.225 | 0.439 | 0.37 |
| HAQTGWVQT | | | | |
| PLNGGVHLYA | 838 | 0.649 | 0.439 | 0.09 |
| QAQRGSVQN | | | | |
| PLNGAFHLYA | 839 | 0.462 | 0.436 | 0.14 |
| QAQTGGVQN | | | | |
| PLNGAVHLYA | 840 | 0.496 | 0.436 | 0.09 |
| LAQTSPVQN | | | | |
| PLNGAVHLYA | 841 | 0.225 | 0.435 | 2.9 |
| QAQTGWVQY | | | | |
| PLNGAVHLYA | 842 | 0.538 | 0.432 | 0.19 |
| QAQTLPVQT | | | | |
| PLNGAVHLYS | 843 | 0.499 | 0.432 | 0.23 |
| QAQTGWFQN | | | | |
| PLNGAVHLYA | 844 | 0.696 | 0.432 | 0.33 |
| QAQTGLVQH | | | | |
| PLNGAVHLYA | 845 | 0.628 | 0.432 | 0.98 |
| QAQTP TVQN | | | | |
| PLYGAVHLYA | 846 | 0.274 | 0.429 | 0.28 |
| QAQTAWVQN | | | | |
| PLNGAVHLYA | 847 | 0.275 | 0.428 | 0.23 |
| KAQTASVQN | | | | |
| PLNGAVHLYA | 848 | 0.285 | 0.428 | 0.19 |
| QAQTASVQK | | | | |
| PLDGSVHLYA | 849 | 0.641 | 0.424 | 0.09 |
| QAQTAWVQN | | | | |
| PLNGADHLYA | 850 | 0.540 | 0.423 | 0.09 |
| QAQTSSVQN | | | | |
| PLNGAVHLYA | 851 | 0.594 | 0.422 | 0.09 |
| QAQTSPVQI | | | | |
| PLNGAVHLYA | 852 | 0.661 | 0.420 | 40 |
| QAQIGWVQN | | | | |
| PLNGAVHLYA | 853 | 0.209 | 0.419 | 0.09 |
| KAQTSTVQN | | | | |
| PLNGAVHRYA | 854 | 0.237 | 0.419 | 0.19 |
| QAQTGWVQT | | | | |
| PLNGAVHLYD | 855 | 0.268 | 0.419 | 0.14 |
| QAQTSTVQN | | | | |
| QLNGAVHLYA | 856 | 0.568 | 0.418 | 69.31 |
| QAQTGLVQN | | | | |
| PLNGAVNLYA | 857 | 0.864 | 0.417 | 0.09 |
| QAQLGPVQN | | | | |
| PLNGAVHLYA | 858 | 0.400 | 0.417 | 0.23 |
| QAQTGWDKN | | | | |
| PLNGALHLYA | 859 | 0.432 | 0.416 | 0.14 |
| QAQTGWVKN | | | | |
| PLNGNVHLYA | 860 | 0.698 | 0.414 | 0.09 |
| HAQTGWVQN | | | | |
| PLNGAVHLYA | 861 | 0.861 | 0.414 | 8.23 |
| QAQKSSVQN | | | | |
| PLNGAVHLYA | 862 | 0.691 | 0.412 | 30.7 |
| QAQTGYVQN | | | | |
| PVNGAVHLYA | 863 | 0.456 | 0.412 | 0.09 |
| QAQVGSVQN | | | | |
| PLNGGVHLYA | 864 | 0.536 | 0.411 | 1.17 |
| QAQTGWVKN | | | | |
| PLNGAVHLYA | 865 | 0.627 | 0.410 | 0.09 |
| QAQRGWVQT | | | | |
| PLNGAVNLYA | 866 | 0.729 | 0.410 | 0.09 |
| QAQRSLVQN | | | | |
| PINGAVHLYA | 867 | 0.358 | 0.410 | 0.51 |
| QAQTGWDQN | | | | |
| PLNGNVHLYA | 868 | 0.536 | 0.410 | 0.23 |
| QAQTGWVQT | | | | |
| PLNGAVHLYA | 869 | 0.265 | 0.409 | 0.23 |
| KAQTGWFQN | | | | |
| PLNGAVHLYA | 870 | 0.421 | 0.408 | 0.09 |
| QEQTSTVQN | | | | |
| PLNGAVHLYA | 871 | 0.281 | 0.406 | 0.14 |
| QAQTGGVEN | | | | |
| PLNGAVHLYS | 872 | 0.831 | 0.406 | 0.09 |
| QAQTGWVQI | | | | |
| SLNGAVHLYA | 873 | 0.480 | 0.406 | 0.09 |
| QAQTGLVQK | | | | |
| PLNGAVHLYA | 874 | 0.605 | 0.403 | 0.09 |
| QAQTGCVRN | | | | |
| PLNGADHLYA | 875 | 0.758 | 0.402 | 0.09 |
| QAQVTPVQN | | | | |
| PLNGAVHLYA | 876 | 0.129 | 0.400 | 0.28 |
| PAQTGWVQT | | | | |
| PLNGDVHLYA | 877 | 0.900 | 0.400 | 0.09 |
| QAQTSAVQN | | | | |
| TLNGAVHLYA | 878 | 0.635 | 0.399 | 0.09 |
| QAQSSLVQN | | | | |
| SLNGAVHLYA | 879 | 0.645 | 0.399 | 0.14 |
| QAQRSVVQN | | | | |
| SLNGAVHLYA | 880 | 0.817 | 0.397 | 0.33 |
| QAQTGWVQS | | | | |
| PVNGAVHLYA | 881 | 0.800 | 0.397 | 0.14 |
| QAQTGWVQS | | | | |
| PLNGAVHLYA | 882 | 0.619 | 0.396 | 0.09 |
| QAQLSPVQS | | | | |
| PLNGAVHLYA | 883 | 0.285 | 0.395 | 0.09 |
| QPQTGWLQN | | | | |
| PLNGAVNLYA | 884 | 0.719 | 0.394 | 0.14 |
| QAQSAPVQN | | | | |
| PLNGTVHLYA | 885 | 0.384 | 0.394 | 0.09 |
| QAQTGWVPN | | | | |
| PVDGAVHLYA | 886 | 0.792 | 0.394 | 0.23 |
| QAQTGSVQN | | | | |
| PLNGAVHLYD | 887 | 0.261 | 0.393 | 0.09 |
| QAQTAAVQN | | | | |
| PLKGAVHLYA | 888 | 0.352 | 0.392 | 0.09 |
| QAQTSTVQN | | | | |
| PLNGAVHLYA | 889 | 0.730 | 0.392 | 0.14 |
| QAQTGPVQT | | | | |
| PLNGAVHLYA | 890 | 0.432 | 0.392 | 0.14 |
| QAQTVGVQK | | | | |
| PLNGAVNLYA | 891 | 0.451 | 0.391 | 0.14 |
| QAQTSTVQN | | | | |
| PLNGAVHLYA | 892 | 0.414 | 0.390 | 0.09 |
| RAQTVSVQN | | | | |
| PLNGAVHLYA | 893 | 0.431 | 0.390 | 0.09 |
| QAQTASGQN | | | | |
| PLNGAVHLYA | 894 | 0.631 | 0.390 | 20.28 |
| QAQSVSVQN | | | | |
| PLNGAVHLYA | 895 | 0.724 | 0.389 | 0.09 |
| QAQSGPVQT | | | | |
| QLNGAVHLYA | 896 | 0.578 | 0.389 | 0.47 |
| QAQTGWGQN | | | | |
| PLNGAVHLYA | 897 | 0.670 | 0.386 | 0.09 |
| QAQVMSVKN | | | | |
| PLNGTVHLYA | 898 | 0.557 | 0.386 | 0.09 |
| KAQTGSVQN | | | | |
| PLNGAVNLYA | 899 | 0.527 | 0.385 | 0.09 |
| QAQTSLVQN | | | | |
| PINGAVHLYA | 900 | 0.867 | 0.385 | 0.14 |
| QAQTLSVQN | | | | |
| PLNGAVHLYA | 901 | 0.458 | 0.384 | 0.09 |
| QAQLGSVQK | | | | |
| TLNGAVHLYA | 902 | 0.728 | 0.383 | 0.09 |
| QAQTAMVQN | | | | |
| PLNGAVHLYA | 903 | 0.775 | 0.383 | 0.09 |
| QAHLSSVQN | | | | |
| PLNGAVHLYA | 904 | 0.552 | 0.380 | 0.09 |
| KAQVMSVQN | | | | |
| PLNGAVHLYA | 905 | 0.569 | 0.380 | 0.09 |
| QAQTGLVLN | | | | |
| PLNGGVHLYA | 906 | 0.491 | 0.378 | 1.03 |
| QAQTGWVQK | | | | |
| PLNGAVHLYA | 907 | 0.250 | 0.378 | 0.61 |
| KAQTGWVQK | | | | |
| PLNGAVLLYA | 908 | 0.482 | 0.378 | 0.09 |
| QAQTASVQN | | | | |
| PLNGDVHLYA | 909 | 0.507 | 0.378 | 0.09 |
| QAQTMAVQN | | | | |
| PLNGAVHLYA | 910 | 0.258 | 0.377 | 0.09 |
| KAQTAAVQN | | | | |
| PLNGAVHLYA | 911 | 0.549 | 0.377 | 763.5 |
| QAQTGLVQN | | | | |
| PLNGDVHLYA | 912 | 0.699 | 0.376 | 0.14 |
| QAQSSPVQN | | | | |
| PLNGAVHLYA | 913 | 0.832 | 0.376 | 14.96 |
| QAQTSNVQN | | | | |
| ALDGAVHLYA | 914 | 0.702 | 0.376 | 0.47 |
| QAQTGSVQN | | | | |
| PLNGAVHLYS | 915 | 0.848 | 0.375 | 0.09 |
| QAQTSSVQN | | | | |
| PLKGAVHLYA | 916 | 0.390 | 0.373 | 0.19 |
| QAQLSPVQN | | | | |
| LLNGAVHLYA | 917 | 0.349 | 0.373 | 0.09 |
| QAQTVSVQN | | | | |
| PLNGGVHLYA | 918 | 0.571 | 0.373 | 0.37 |
| QAQTGWVQI | | | | |
| PLNGAVHLYS | 919 | 0.863 | 0.372 | 0.14 |
| QAQTGWVRN | | | | |
| PLNGAVHLYA | 920 | 0.426 | 0.371 | 0.09 |
| QAQTGWGHN | | | | |
| PHNGAVHLYA | 921 | 0.849 | 0.371 | 0.09 |
| QAQTTSVQN | | | | |
| PLNRAVHLYA | 922 | 0.436 | 0.371 | 0.09 |
| QAQTGWVQK | | | | |
| PLNGAVHLYD | 923 | 0.509 | 0.371 | 0.09 |
| QAQRASVQN | | | | |
| PLNGAVHLYS | 924 | 0.800 | 0.370 | 584.7 |
| QAQTGWVQN | | | | |
| PLNGSVHLYA | 925 | 0.401 | 0.370 | 0.42 |
| QAQTGTVQN | | | | |
| PLNGAVHLYD | 926 | 0.752 | 0.370 | 0.09 |
| QAQTSGVQN | | | | |
| PLNGAVHLYA | 927 | 0.389 | 0.368 | 0.19 |
| QAKTGWFQN | | | | |
| KLDGAVHLYA | 928 | 0.763 | 0.367 | 0.14 |
| QAQTGLVQN | | | | |
| PLNGAVHLYA | 929 | 0.581 | 0.363 | 9.39 |
| QAQSQMVQN | | | | |
| TLNGAVHLYA | 930 | 0.706 | 0.363 | 0.09 |
| QAQTSVVQN | | | | |
| PLNGAVHLYA | 931 | 0.449 | 0.361 | 0.09 |
| KAQTGTVQN | | | | |
| PLNGAVHLYA | 932 | 0.440 | 0.361 | 0.09 |
| QAQTVSVHN | | | | |
| PLNGAVHLYA | 933 | 0.559 | 0.361 | 0.19 |
| QAQLSSVQT | | | | |
| PVNGAVHLYA | 934 | 0.791 | 0.359 | 0.28 |
| QAQTGWFQN | | | | |
| PLNGAVHLYA | 935 | 0.266 | 0.356 | 0.09 |
| QAQTASVRN | | | | |
| PLNGDVHLYA | 936 | 0.410 | 0.355 | 0.09 |
| QAQTSTVQN | | | | |
| PLNGAVHLYA | 937 | 0.477 | 0.354 | 0.09 |
| KAQLGSVQN | | | | |
| PINGAVHLYA | 938 | 0.774 | 0.354 | 0.09 |
| QAQLVPVQN | | | | |
| PLNGAVHHYA | 939 | 0.833 | 0.354 | 0.09 |
| QAQLGPVQN | | | | |
| PLNGAVHLYA | 940 | 0.387 | 0.353 | 0.19 |
| PAQTGWVQH | | | | |
| PLNGAVHLYA | 941 | 0.696 | 0.353 | 0.56 |
| QAQVPAVQN | | | | |
| PLNGAVNLYA | 942 | 0.774 | 0.353 | 0.09 |
| QAQRLSVQN | | | | |
| PLNGAVHLYA | 943 | 0.534 | 0.352 | 0.23 |
| QAQTGRVQK | | | | |
| PLNGAVLLYA | 944 | 0.370 | 0.352 | 0.09 |
| QAQTVSVQN | | | | |
| PLNGAVHLYA | 945 | 0.510 | 0.351 | 11.4 |
| QAQAMSVQN | | | | |
| PLNGAVHLYA | 946 | 0.451 | 0.351 | 0.23 |
| QAQTAWVHN | | | | |
| PLNGAVHLYA | 947 | 0.615 | 0.350 | 0.09 |
| QPQTGWVRN | | | | |
| PLNGAVHLYA | 948 | 0.548 | 0.350 | 0.09 |
| QEQTGWLQN | | | | |
| PLNGAVHLYA | 949 | 0.535 | 0.348 | 0.09 |
| KAQTSAVQN | | | | |
| PLNGSVHLYA | 950 | 0.126 | 0.348 | 0.98 |
| QAQTVWVQN | | | | |
| PLNGTVHLYA | 951 | 0.330 | 0.347 | 0.33 |
| QAQTGWFQN | | | | |
| PLNGAVNLYA | 952 | 0.375 | 0.347 | 0.23 |
| QAQVASVQN | | | | |
| PLNGAVHLYA | 953 | 0.674 | 0.347 | 0.19 |
| QAQTGLVRN | | | | |
| PLNGAVNLYA | 954 | 0.587 | 0.346 | 0.09 |
| QAQLSTVQN | | | | |
| PLNGAVHLYA | 955 | 0.721 | 0.346 | 0.09 |
| KAQTQPVQN | | | | |
| PLNGTVHLYA | 956 | 0.382 | 0.346 | 0.33 |
| QAQTGWGQN | | | | |
| PLNGAVHLYA | 957 | 0.453 | 0.345 | 0.09 |
| QAQRTLVQT | | | | |
| PLNGAVHLYA | 958 | 0.157 | 0.345 | 0.61 |
| QAQTGSIQN | | | | |
| QLNGAVHLYA | 959 | 0.574 | 0.344 | 1.4 |
| QAQTGWDQN | | | | |
| PLNGAVHLYA | 960 | 0.599 | 0.344 | 0.14 |
| QAQLSSVKN | | | | |
| QLNGAVHLYA | 961 | 0.451 | 0.343 | 1.45 |
| QAQTVSVQN | | | | |
| PLNGAVHLYA | 962 | 0.726 | 0.343 | 0.09 |
| QAQTLQVQK | | | | |
| TLNGAVHLYA | 963 | 0.573 | 0.343 | 0.14 |
| QAQVLPVQN | | | | |
| PLNGAVHLYA | 964 | 0.756 | 0.342 | 0.09 |
| QAQVGSVKN | | | | |
| PLNGAVHLYA | 965 | 0.744 | 0.341 | 0.09 |
| QAQLAPLQN | | | | |
| QLNGAVHLYA | 966 | 0.716 | 0.341 | 0.09 |
| QAQTGSVKN | | | | |
| PLNGAVHHYA | 967 | 0.620 | 0.341 | 0.09 |
| QAQRSTVQN | | | | |
| QLNGSVHLYA | 968 | 0.266 | 0.341 | 0.23 |
| QAQTGRVQN | | | | |
| TLNGAVHLYA | 969 | 0.818 | 0.340 | 0.09 |
| QAQVKPVQN | | | | |
| PLNGTVHLYA | 970 | 0.784 | 0.339 | 24.58 |
| QAQTGLVQN | | | | |
| PLNGAVHLYA | 971 | 0.396 | 0.338 | 0.65 |
| QAQTPGVQN | | | | |
| PINGAVHLYA | 972 | 0.713 | 0.338 | 0.28 |
| QAQTSSVQN | | | | |
| PLNGAVHLYA | 973 | 0.428 | 0.337 | 0.09 |
| QAQLSAVQT | | | | |
| PLNGAVHLYS | 974 | 0.446 | 0.337 | 0.47 |
| QAQTGWDQN | | | | |
| PLNCAVHLYA | 975 | 0.856 | 0.336 | 14.39 |
| QAQTGWVQN | | | | |
| PLNGAVNLYA | 976 | 0.624 | 0.336 | 0.14 |
| QAQTMPVQN | | | | |
| PLNGAVHLYS | 977 | 0.283 | 0.335 | 0.09 |
| QAQTVAVQN | | | | |
| PLNGTVHLYA | 978 | 0.366 | 0.334 | 0.79 |
| QAQTGWVKN | | | | |
| PLNGGVHLYA | 979 | 0.465 | 0.333 | 0.37 |
| QAQTGWVHN | | | | |
| QLNGAVHLYA | 980 | 0.558 | 0.332 | 1.59 |
| QAQTGWVQK | | | | |
| PLNGAVQLYA | 981 | 0.524 | 0.331 | 0.09 |
| QAQTLAVQN | | | | |
| PLNGTVHLYA | 982 | 0.695 | 0.331 | 0.09 |
| QAQVGSVQN | | | | |
| PLNGGVHLYA | 983 | 0.764 | 0.330 | 17.67 |
| QAQTGGVQN | | | | |
| PLKGAVHLYA | 984 | 0.474 | 0.330 | 0.09 |
| QAQVSQVQN | | | | |
| PLNGAVHHYA | 985 | 0.526 | 0.330 | 0.09 |
| QAQTQPVQN | | | | |
| PLNGAVHLYA | 986 | 0.156 | 0.329 | 0.33 |
| QAP TGWVQT | | | | |
| PLNGAVNLYA | 987 | 0.343 | 0.329 | 0.33 |
| QAQTMSVQN | | | | |
| PLNGAVHLYA | 988 | 0.681 | 0.329 | 29.16 |
| QAQTGVVQN | | | | |
| PLNGAVHLYA | 989 | 0.622 | 0.328 | 0.42 |
| QAQVPQVQN | | | | |
| PHNGAVHLYA | 990 | 0.295 | 0.327 | 0.14 |
| QAQTMSVQN | | | | |
| QLNGAVHLYA | 991 | 0.493 | 0.327 | 0.56 |
| QAQTGWLQN | | | | |
| PLNGAVHLYA | 992 | 0.118 | 0.327 | 1.03 |
| QAQTGCVQK | | | | |
| SLNGAVHLYA | 993 | 0.712 | 0.327 | 0.28 |
| QAQTSLVQN | | | | |
| PLNGAVHLYA | 994 | 0.422 | 0.326 | 0.23 |
| QAQTRWVQT | | | | |
| TLNGAVHLYA | 995 | 0.743 | 0.325 | 0.09 |
| QAQTVQVQN | | | | |
| ALNGAVHLYA | 996 | 0.762 | 0.324 | 0.09 |
| QAQKGGVQN | | | | |
| PLNGAVHLYD | 997 | 0.143 | 0.323 | 0.09 |
| QAQVSGVQN | | | | |
| PLNGAVHLYA | 998 | 0.554 | 0.323 | 0.65 |
| QAQTGLDQN | | | | |
| PLNGAVPLYA | 999 | 0.387 | 0.323 | 0.42 |
| QAQTGWVQT | | | | |
| PLNGAVHLYA | 1000 | 0.414 | 0.323 | 0.09 |
| QAQVS SVHN | | | | |
| TLNGAVHLYA | 1001 | 0.264 | 0.322 | 0.09 |
| QAQTNSVQN | | | | |
| PLNGAGHLYA | 1002 | 0.479 | 0.321 | 0.09 |
| QAQLSPVQN | | | | |
| HLNGAVHLYA | 1003 | 0.532 | 0.321 | 0.19 |
| QAQTGRVQN | | | | |
| PLNGAVHLYD | 1004 | 0.872 | 0.320 | 0.09 |
| QAQTAMVQN | | | | |
| PINGAVHLYA | 1005 | 0.646 | 0.320 | 0.33 |
| QAQTGWVQH | | | | |
| PLNGAVQLYA | 1006 | 0.479 | 0.319 | 0.09 |
| QAQTLQVQN | | | | |
| PLNGAVHLYA | 1007 | 0.323 | 0.318 | 0.28 |
| QAQKGWVQT | | | | |
| PLNGAVHHYA | 1008 | 0.592 | 0.318 | 0.09 |
| QAQSTSVQN | | | | |
| PLNGYVHLYA | 1009 | 0.187 | 0.317 | 2.99 |
| QAQTGWVQN | | | | |
| PLNGAVHIYA | 1010 | 0.599 | 0.316 | 0.09 |
| QAQVQSVQN | | | | |
| PLIGAVHLYA | 1011 | 0.535 | 0.315 | 0.09 |
| QAQLSPVQN | | | | |
| TLNGAVHLYA | 1012 | 0.774 | 0.315 | 0.09 |
| QAQLLPVQN | | | | |
| PLNGAVHLYS | 1013 | 0.747 | 0.315 | 0.84 |
| QAQTGWVQT | | | | |
| ALNGAVHLYA | 1014 | 0.444 | 0.315 | 0.14 |
| QAQTQLVQN | | | | |
| PLNGAVHLYA | 1015 | 0.810 | 0.315 | 34.86 |
| QAQSLPVQN | | | | |
| PVNGAVHLYA | 1016 | 0.890 | 0.314 | 0.09 |
| QAQTGWVPN | | | | |
| PLNGAVHLYA | 1017 | 0.247 | 0.313 | 0.19 |
| QAKTVSVQN | | | | |
| PLNGAVHLYA | 1018 | 0.645 | 0.313 | 0.09 |
| QAQTTSVHN | | | | |
| PVNGAVHLYA | 1019 | 0.765 | 0.313 | 939 |
| QAQTGWVQN | | | | |
| PLNGAVHLYA | 1020 | 0.476 | 0.313 | 0.09 |
| QAHTGWVQI | | | | |
| PLNGAVRLYA | 1021 | 0.611 | 0.313 | 0.09 |
| QAQTASVQN | | | | |
| PLNGGVHLYA | 1022 | 0.646 | 0.313 | 0.09 |
| QAQTGLVQK | | | | |
| PLNGAVNLYA | 1023 | 0.652 | 0.313 | 0.14 |
| QAQVMSVQN | | | | |
| PLNGAVNLYA | 1024 | 0.682 | 0.312 | 0.09 |
| QAQSMSVQN | | | | |
| PLNGAVHLYA | 1025 | 0.513 | 0.312 | 0.09 |
| PAQTGWGQN | | | | |
| QLNGAVHLYA | 1026 | 0.595 | 0.311 | 0.47 |
| QAQTGWAQN | | | | |
| PLNGAVHLYA | 1027 | 0.451 | 0.311 | 23.13 |
| QAQTVWVQN | | | | |
| QLNGAVHLYA | 1028 | 0.742 | 0.311 | 0.09 |
| QAQSVSVQN | | | | |
| PLNGAVHLYA | 1029 | 0.426 | 0.311 | 0.09 |
| QAQTAQLQN | | | | |
| PLNGAVHLYA | 1030 | 0.453 | 0.311 | 0.09 |
| QAHVASVQN | | | | |
| PLNGAVHLYA | 1031 | 0.440 | 0.310 | 0.09 |
| KAQRSTVQN | | | | |
| QLNGAVHLYA | 1032 | 0.509 | 0.310 | 1.92 |
| QAQTGWVKN | | | | |
| PLNGAVHLYA | 1033 | 0.281 | 0.310 | 0.28 |
| QAQTRWVKN | | | | |
| PLNGAVHLYA | 1034 | 0.381 | 0.310 | 0.19 |
| QAQTAWIQN | | | | |
| PLNGAVHLYA | 1035 | 0.393 | 0.310 | 0.09 |
| QAQLSQVKN | | | | |
| SLNGAVHLYA | 1036 | 0.816 | 0.310 | 2284 |
| QAQTGWVQN | | | | |
| PLNGAVHLYA | 1037 | 0.390 | 0.309 | 0.14 |
| QAQTSTVKN | | | | |
| PLNGAVHLYA | 1038 | 0.654 | 0.309 | 16.82 |
| QAQALPVQN | | | | |
| PLNGAVHLYD | 1039 | 0.158 | 0.309 | 0.33 |
| QAQTGWFQN | | | | |
| PLNGAVHVYA | 1040 | 0.527 | 0.309 | 0.09 |
| QAQTGWFQN | | | | |
| PINGAVHLYA | 1041 | 0.386 | 0.308 | 0.09 |
| QAQVGSVQN | | | | |
| PLNGSVHLYA | 1042 | 0.418 | 0.308 | 0.14 |
| QAQTTGVQN | | | | |
| PLNGAVHLYA | 1043 | 0.874 | 0.307 | 0.09 |
| KAQASPVQN | | | | |
| PLNGSVHLYA | 1044 | 0.192 | 0.307 | 0.09 |
| QAQKAWVQN | | | | |
| SLNGAVHLYA | 1045 | 0.270 | 0.307 | 0.09 |
| QAQVLGVQN | | | | |
| PLNGAVHLYA | 1046 | 0.827 | 0.306 | 0.09 |
| QEQLMPVQN | | | | |
| ALNGAVHLYA | 1047 | 0.872 | 0.306 | 18.51 |
| QSQTGWVQN | | | | |
| PLNGYVHLYD | 1048 | 0.508 | 0.305 | 0.09 |
| QAQTGWVQN | | | | |
| PLNGAVHLYA | 1049 | 0.505 | 0.305 | 0.09 |
| QAQTSMVQT | | | | |
| QLNGAVHLYA | 1050 | 0.588 | 0.304 | 0.14 |
| QAQISSVQN | | | | |
| PVNGAVHLYA | 1051 | 0.723 | 0.304 | 1.12 |
| QAQTGWVQT | | | | |
| PLNGAVHLYA | 1052 | 0.713 | 0.303 | 0.09 |
| QEQTATVQN | | | | |
| PLNGAVYLYA | 1053 | 0.352 | 0.302 | 0.09 |
| QAQTVSVQN | | | | |
| PLNGNVHLYA | 1054 | 0.521 | 0.302 | 0.09 |
| QAQTASVQN | | | | |
| PLNGYVHLYA | 1055 | 0.556 | 0.301 | 0.09 |
| QAQTGLVQN | | | | |
| PLNGAVHLYD | 1056 | 0.402 | 0.301 | 0.14 |
| QAQTLSVQN | | | | |
| PLNGAVHLYA | 1057 | 0.499 | 0.300 | 0.14 |
| QAQTSSVQH | | | | |
| SLNGAVHLYA | 1058 | 0.737 | 0.300 | 0.19 |
| QAQTGWVPN | | | | |
| PLNGAVHLYA | 1059 | 0.839 | 0.300 | 0.09 |
| QAQTAMVKN | | | | |
| TLNGAVHLYA | 1060 | 0.700 | 0.299 | 0.14 |
| QAQRLSVQN | | | | |
| ALNGAVHLYA | 1061 | 0.341 | 0.297 | 1.64 |
| QAQTGWVQK | | | | |
| PLNGAVHLYA | 1062 | 0.722 | 0.297 | 0.19 |
| KAQTALVQN | | | | |
| QLNGAVHLYA | 1063 | 0.743 | 0.297 | 0.23 |
| QAQTAKVQN | | | | |
| PLNGADHLYA | 1064 | 0.744 | 0.297 | 0.14 |
| QAQTTSVQN | | | | |
| PLNGAVHLYA | 1065 | 0.259 | 0.297 | 0.93 |
| QAQTPWVQN | | | | |
| PLNGTVHLYA | 1066 | 0.324 | 0.296 | 0.28 |
| QAQTGWIQN | | | | |
| PLNGAVHLYA | 1067 | 0.286 | 0.296 | 0.23 |
| QAHTGWVQH | | | | |
| PLNGAVHLYA | 1068 | 0.622 | 0.296 | 0.09 |
| RAQTASVQN | | | | |
| TLNGAVHLYA | 1069 | 0.876 | 0.295 | 0.14 |
| QAQRSLVQN | | | | |
| PLNGAVHLYA | 1070 | 0.481 | 0.294 | 0.14 |
| QAHTGWVQK | | | | |
| PLNGDVHLYA | 1071 | 0.859 | 0.294 | 0.14 |
| QAQTAQVQN | | | | |
| TLNGAVHLYA | 1072 | 0.407 | 0.294 | 0.14 |
| QAQTQPVQN | | | | |
| PLNGAVHLYA | 1073 | 0.505 | 0.294 | 0.7 |
| QAQTPRVQN | | | | |
| PRNGAVHLYA | 1074 | 0.200 | 0.293 | 0.09 |
| QAQTMSVQN | | | | |
| PLNGAVHLYA | 1075 | 0.118 | 0.293 | 0.23 |
| QAHTVSVQN | | | | |
| PVNGAVHLYA | 1076 | 0.823 | 0.293 | 0.14 |
| QAQTGLVQT | | | | |
| PLNGAVHLYA | 1077 | 0.899 | 0.292 | 87.25 |
| QAQSSSVQN | | | | |
| PLNGAVHLYA | 1078 | 0.497 | 0.292 | 0.84 |
| QAQRPPVQN | | | | |
| PLNGAVHLYT | 1079 | 0.779 | 0.291 | 0.09 |
| QAQVSPVQN | | | | |
| PLNGAVPLYA | 1080 | 0.661 | 0.291 | 0.09 |
| QAQTTPVQN | | | | |
| ALNGAVHLYA | 1081 | 0.293 | 0.290 | 1.59 |
| QAQTGWVKN | | | | |
| SLNGAVHLYA | 1082 | 0.871 | 0.290 | 0.56 |
| QAQTGWVRN | | | | |
| PLNGAVHLYA | 1083 | 0.316 | 0.288 | 0.09 |
| QAQLAGVKN | | | | |
| PLNGAVHLYA | 1084 | 0.427 | 0.288 | 0.09 |
| QAQTSPAQN | | | | |
| PLNGAVHLYA | 1085 | 0.539 | 0.288 | 0.19 |
| KAQLSSVQN | | | | |
| PLNGAVHLYA | 1086 | 0.526 | 0.285 | 0.14 |
| QAQRSPVQT | | | | |
| PLNGAVHLYA | 1087 | 0.826 | 0.285 | 0.14 |
| HAQTMSVQN | | | | |
| PLNGNVHLYA | 1088 | 0.429 | 0.284 | 0.14 |
| QAQTGWVKN | | | | |
| PLNGAVHLYA | 1089 | 0.409 | 0.284 | 0.09 |
| QAQTGWVPH | | | | |
| PLNGAVHLYA | 1090 | 0.442 | 0.284 | 0.09 |
| QAQPGWGQN | | | | |
| PLNGVVHLYA | 1091 | 0.291 | 0.284 | 0.14 |
| QAQTVSVQN | | | | |
| PLNGDVHLYA | 1092 | 0.499 | 0.283 | 0.19 |
| QAQTSSVQN | | | | |
| PLNGAVHIYA | 1093 | 0.570 | 0.283 | 0.14 |
| QAQTLSVQN | | | | |
| PLNGAVHLYA | 1094 | 0.597 | 0.283 | 0.19 |
| QAQIPPVQN | | | | |
| SLNGAVHLYA | 1095 | 0.856 | 0.282 | 1.03 |
| QAQTGWVQH | | | | |
| PLNAAVHLYA | 1096 | 0.466 | 0.282 | 0.14 |
| QAQTGWDQN | | | | |
| PLNGAVHRYA | 1097 | 0.823 | 0.282 | 0.09 |
| QAQTTSVQN | | | | |
| PLNGSVHLYA | 1098 | 0.394 | 0.281 | 0.09 |
| QAQPGSVQN | | | | |
| PLDGAVHLYA | 1099 | 0.838 | 0.281 | 0.09 |
| QAQTGWVEN | | | | |
| PLNGAVHLYA | 1100 | 0.524 | 0.281 | 0.33 |
| QAQTGRVKN | | | | |
| PLNGAVHLYA | 1101 | 0.435 | 0.281 | 0.33 |
| QAQTGRLQN | | | | |
| PLNGSVHLYA | 1102 | 0.584 | 0.281 | 0.28 |
| QAQTARVQN | | | | |
| PLNGAVHLYD | 1103 | 0.378 | 0.280 | 0.19 |
| QAQLSSVQN | | | | |
| ALNGAVHLYA | 1104 | 0.550 | 0.280 | 0.09 |
| QAQTRLVQN | | | | |
| PLNGAVNLYA | 1105 | 0.780 | 0.280 | 0.19 |
| QAQTAQVQN | | | | |
| PLNGAVHLYA | 1106 | 0.461 | 0.279 | 0.09 |
| QAQLSSVQH | | | | |
| PLNGAVHLYA | 1107 | 0.799 | 0.279 | 0.09 |
| QAHTGPVQN | | | | |
| PLKGAVHLYA | 1108 | 0.872 | 0.279 | 0.09 |
| QAQTLSVQN | | | | |
| ALNGAVHLYA | 1109 | 0.499 | 0.279 | 0.09 |
| QAQKAWVQN | | | | |
| PLNGAVHLYA | 1110 | 0.386 | 0.278 | 0.09 |
| QAQAGWVQT | | | | |
| PLNGAVHLYA | 1111 | 0.709 | 0.278 | 0.19 |
| QAQTGLVQS | | | | |
| PLNGAVHLYA | 1112 | 0.436 | 0.277 | 0.14 |
| QAQTGCVQI | | | | |
| QLNGAVHLYA | 1113 | 0.529 | 0.276 | 1.26 |
| QAQPGWVQN | | | | |
| PLNGAVHLYA | 1114 | 0.678 | 0.276 | 0.37 |
| QAQRPGVQN | | | | |
| PLNGAVHLYA | 1115 | 0.265 | 0.276 | 0.09 |
| QAQTAAVQH | | | | |
| PLNGADHLYA | 1116 | 0.728 | 0.276 | 0.09 |
| QAQTMPVQN | | | | |
| PLNGAVHLYA | 1117 | 0.198 | 0.276 | 0.33 |
| KAQTGWVQT | | | | |
| QLNGAVHLYA | 1118 | 0.819 | 0.275 | 0.09 |
| QAQKAWVQN | | | | |
| PLNGAVHLYA | 1119 | 0.116 | 0.274 | 0.98 |
| QAQTGCDQN | | | | |
| PLNGTVHLYA | 1120 | 0.513 | 0.274 | 0.09 |
| QEQTGSVQN | | | | |
| PLNGAVNLYA | 1121 | 0.671 | 0.274 | 0.09 |
| QAQSSLVQN | | | | |
| ALNGAVHLYA | 1122 | 0.296 | 0.274 | 0.23 |
| QAQTGWVEN | | | | |
| PLNGTVHLYA | 1123 | 0.405 | 0.274 | 0.14 |
| QAQTGWVQY | | | | |
| PINGAVHLYA | 1124 | 0.373 | 0.273 | 0.75 |
| QAQTGWVQK | | | | |
| PLNGAVHLYA | 1125 | 0.820 | 0.273 | 0.09 |
| QAQTGRVRN | | | | |
| PLNGAVHLYA | 1126 | 0.590 | 0.272 | 0.37 |
| QAQTGRDQN | | | | |
| QLNGAVHLYA | 1127 | 0.409 | 0.272 | 0.23 |
| QAQSALVQN | | | | |
| PLNGVVHLYA | 1128 | 0.422 | 0.272 | 0.09 |
| QAQTGWVQK | | | | |
| PLNGAVHLYA | 1129 | 0.534 | 0.272 | 0.14 |
| QAHTGWGQN | | | | |
| PLNGDVHLYA | 1130 | 0.638 | 0.272 | 0.09 |
| QAQRSLVQN | | | | |
| PLNGNVHLYA | 1131 | 0.711 | 0.272 | 0.09 |
| QAQTVWVQN | | | | |
| PLNGAVHLYA | 1132 | 0.332 | 0.272 | 0.23 |
| QAP TGWVQH | | | | |
| PLNGAVHLYS | 1133 | 0.725 | 0.271 | 0.23 |
| QAQTGWGQN | | | | |
| ALNGSVHLYA | 1134 | 0.729 | 0.271 | 0.09 |
| QAQTGWVQT | | | | |
| PLNGAVQLYA | 1135 | 0.347 | 0.271 | 0.09 |
| QAQRSTVQN | | | | |
| PLNGTVHLYA | 1136 | 0.434 | 0.271 | 0.28 |
| QAQTGTVQN | | | | |
| PLNGTVHLYA | 1137 | 0.549 | 0.271 | 0.37 |
| QAQTGWVQI | | | | |
| QLNGYVHLYA | 1138 | 0.513 | 0.626 | 0.09 |
| QAQTGWVQN | | | | |

TABLE 24
NGS fold-enrichment of TTD-001 matured AAV capsid variants brain and DRG of
cynomolgus macaques and the brain of marmosets

| | | Brain of | | DRG of | | | |
|---|---|---|---|---|---|---|---|
| | | cynomolgus | | cynomolgus | | Brain of | |
| | | macaques | | macaques | | marmosets | |
| | | Fold | Fold | Fold | Fold | Fold | Fold |
| | | change | change | change | change | change | change |
| | SEQ | relative | relative | relative | relative | relative | relative |
| | ID | to | to | to | to | to | to |
| Sequence | NO | AAV9 | TTD-001 | AAV9 | TTD-001 | AAV9 | TTD-001 |
| ALNGAVHLYAQAQTG | 1122 | 12.707 | 0.274 | 0.000 | 0.000 | 420.579 | 571.155 |
| WVEN | | | | | | | |
| PINGAVHLYAQAQTG | 40 | 8.716 | 0.188 | 2.100 | 13.718 | 573.779 | 779.203 |
| WVEN | | | | | | | |
| PLNGAVHLNAQAQTG | 41 | 0.919 | 0.020 | 2.175 | 14.212 | 677.878 | 920.572 |
| WVEN | | | | | | | |
| PLNGAVHLYAQAQSG | 42 | 5.505 | 0.119 | 0.000 | 0.000 | 263.098 | 357.292 |
| WVEN | | | | | | | |
| PLNGAVHLYAQAQTA | 43 | 8.721 | 0.188 | 0.827 | 5.405 | 236.026 | 320.528 |
| WVEN | | | | | | | |
| PLNGAVHLYAQAQTG | 44 | 4.126 | 0.089 | 0.245 | 1.603 | 475.164 | 645.282 |
| CVEN | | | | | | | |
| PLNGAVHLYAQAQTG | 871 | 18.851 | 0.406 | 0.491 | 3.206 | 288.900 | 392.332 |
| GVEN | | | | | | | |
| PLNGAVHLYAQAQTG | 45 | 5.050 | 0.109 | 0.000 | 0.000 | 541.666 | 735.593 |
| LVEN | | | | | | | |
| PLNGAVHLYAQAQTG | 818 | 20.878 | 0.450 | 2.856 | 18.662 | 571.096 | 775.559 |
| SVEN | | | | | | | |
| PLNGAVHLYAQAQTG | 804 | 21.437 | 0.462 | 1.362 | 8.901 | 381.679 | 518.327 |
| WVEN | | | | | | | |
| PLNGSVHLYAQAQTG | 499 | 43.595 | 0.939 | 2.334 | 15.248 | 490.137 | 665.615 |
| WVEN | | | | | | | |
| PVNGAVHLYAQAQTG | 46 | 6.311 | 0.136 | 0.000 | 0.000 | 506.376 | 687.669 |
| WVEN | | | | | | | |
| QLNGAVHLYAQAQTG | 603 | 32.086 | 0.691 | 0.000 | 0.000 | 290.854 | 394.985 |
| WVEN | | | | | | | |
| SLNGAVHLYAQAQTG | 47 | 8.707 | 0.188 | 2.111 | 13.795 | 302.059 | 410.202 |
| WVEN | | | | | | | |
| TLNGAVHLYAQAQTG | 48 | 0.707 | 0.015 | 0.624 | 4.074 | 254.330 | 345.385 |
| WVEN | | | | | | | |
| ALNGAVHLYAQAQTG | 819 | 20.878 | 0.450 | 0.667 | 4.356 | 232.682 | 315.986 |
| WVHN | | | | | | | |
| PHNGAVHLYAQAQTG | 49 | 3.604 | 0.078 | 4.410 | 28.816 | 177.855 | 241.530 |
| WVHN | | | | | | | |
| PINGAVHLYAQAQTG | 50 | 6.387 | 0.138 | 1.083 | 7.076 | 124.477 | 169.043 |
| WVHN | | | | | | | |
| PLKGAVHLYAQAQTG | 51 | 0.986 | 0.021 | 0.516 | 3.368 | 118.166 | 160.472 |
| WVHN | | | | | | | |
| PLNGAAHLYAQAQTG | 52 | 0.757 | 0.016 | 1.024 | 6.693 | 91.230 | 123.892 |
| WVHN | | | | | | | |
| PLNGADHLYAQAQTG | 53 | 0.842 | 0.018 | 0.540 | 3.529 | 15.514 | 21.069 |
| WVHN | | | | | | | |
| PLNGAGHLYAQAQTG | 54 | 1.198 | 0.026 | 1.451 | 9.479 | 106.338 | 144.409 |
| WVHN | | | | | | | |
| PLNGALHLYAQAQTG | 55 | 2.023 | 0.044 | 0.000 | 0.000 | 148.895 | 202.202 |
| WVHN | | | | | | | |
| PLNGAVDLYAQAQTG | 56 | 3.104 | 0.067 | 0.000 | 0.000 | 149.296 | 202.747 |
| WVHN | | | | | | | |
| PLNGAVHHYAQAQTG | 57 | 2.959 | 0.064 | 1.184 | 7.735 | 162.209 | 220.283 |
| WVHN | | | | | | | |
| PLNGAVHIYAQAQTG | 58 | 2.284 | 0.049 | 0.000 | 0.000 | 160.204 | 217.560 |
| WVHN | | | | | | | |
| PLNGAVHLDAQAQTG | 59 | 0.667 | 0.014 | 0.333 | 2.175 | 298.308 | 405.108 |
| WVHN | | | | | | | |
| PLNGAVHLNAQAQTG | 60 | 2.297 | 0.050 | 2.821 | 18.432 | 417.906 | 567.525 |
| WVHN | | | | | | | |
| PLNGAVHLSAQAQTG | 61 | 1.946 | 0.042 | 1.987 | 12.982 | 427.101 | 580.011 |
| WVHN | | | | | | | |
| PLNGAVHLYAKAQTG | 62 | 7.514 | 0.162 | 0.000 | 0.000 | 75.629 | 102.705 |
| WVHN | | | | | | | |
| PLNGAVHLYAQAKTG | 63 | 2.441 | 0.053 | 0.998 | 6.522 | 78.923 | 107.179 |
| WVHN | | | | | | | |
| PLNGAVHLYAQAQAG | 64 | 1.527 | 0.033 | 0.000 | 0.000 | 132.644 | 180.133 |
| WVHN | | | | | | | |
| PLNGAVHLYAQAQRG | 65 | 4.707 | 0.101 | 0.000 | 0.000 | 24.765 | 33.632 |
| WVHN | | | | | | | |
| PLNGAVHLYAQAQSG | 66 | 3.622 | 0.078 | 0.000 | 0.000 | 117.858 | 160.053 |
| WVHN | | | | | | | |
| PLNGAVHLYAQAQTA | 946 | 16.279 | 0.351 | 0.452 | 2.953 | 234.444 | 318.380 |
| WVHN | | | | | | | |
| PLNGAVHLYAQAQTG | 67 | 4.347 | 0.094 | 0.356 | 2.328 | 255.533 | 347.018 |
| CVHN | | | | | | | |
| PLNGAVHLYAQAQTG | 491 | 44.261 | 0.954 | 1.261 | 8.238 | 175.856 | 238.815 |
| GVHN | | | | | | | |
| PLNGAVHLYAQAQTG | 68 | 6.977 | 0.150 | 0.000 | 0.000 | 140.966 | 191.435 |
| LVHN | | | | | | | |
| PLNGAVHLYAQAQTG | 576 | 34.946 | 0.753 | 2.147 | 14.025 | 187.304 | 254.363 |
| SVHN | | | | | | | |
| PLNGAVHLYAQAQTG | 755 | 23.437 | 0.505 | 0.865 | 5.655 | 192.126 | 260.911 |
| WVHN | | | | | | | |
| PLNGAVHLYAQAQVS | 69 | 8.212 | 0.177 | 0.000 | 0.000 | 319.448 | 433.817 |
| AVHN | | | | | | | |
| PLNGAVHLYAQEQTG | 70 | 2.986 | 0.064 | 0.000 | 0.000 | 93.114 | 126.451 |
| WVHN | | | | | | | |
| PLNGAVHLYAQGQTG | 71 | 1.725 | 0.037 | 0.000 | 0.000 | 26.926 | 36.566 |
| WVHN | | | | | | | |
| PLNGAVHLYDQAQTG | 72 | 1.514 | 0.033 | 0.279 | 1.822 | 142.794 | 193.917 |
| WVHN | | | | | | | |
| PLNGAVHLYGQAQTG | 73 | 1.401 | 0.030 | 0.000 | 0.000 | 116.707 | 158.491 |
| WVHN | | | | | | | |
| PLNGAVHLYSQAQTG | 74 | 9.806 | 0.211 | 0.000 | 0.000 | 100.716 | 136.775 |
| WVHN | | | | | | | |
| PLNGAVHRYAQAQTG | 75 | 5.991 | 0.129 | 0.000 | 0.000 | 13.869 | 18.834 |
| WVHN | | | | | | | |
| PLNGAVHVYAQAQTG | 76 | 2.959 | 0.064 | 0.000 | 0.000 | 159.742 | 216.933 |
| WVHN | | | | | | | |
| PLNGAVNLYAQAQTG | 77 | 2.387 | 0.051 | 0.631 | 4.121 | 78.989 | 107.268 |
| WVHN | | | | | | | |
| PLNGAVPLYAQAQTG | 78 | 2.946 | 0.063 | 0.774 | 5.060 | 124.967 | 169.708 |
| WVHN | | | | | | | |
| PLNGAVQLYAQAQTG | 79 | 2.338 | 0.050 | 1.085 | 7.091 | 105.426 | 143.170 |
| WVHN | | | | | | | |
| PLNGGVHLYAQAQTG | 979 | 15.473 | 0.333 | 0.626 | 4.090 | 185.552 | 251.984 |
| WVHN | | | | | | | |
| PLNGSVHLYAQAQTG | 703 | 25.824 | 0.556 | 1.283 | 8.381 | 360.426 | 489.465 |
| WVHN | | | | | | | |
| PLNGTVHLYAQAQTG | 80 | 10.315 | 0.222 | 0.000 | 0.000 | 159.224 | 216.229 |
| WVHN | | | | | | | |
| PRNGAVHLYAQAQTG | 81 | 2.842 | 0.061 | 1.016 | 6.636 | 163.614 | 222.192 |
| WVHN | | | | | | | |
| PVNGAVHLYAQAQTG | 82 | 8.023 | 0.173 | 0.761 | 4.971 | 402.937 | 547.197 |
| WVHN | | | | | | | |
| QLNGAVHLYAQAQTG | 816 | 21.018 | 0.453 | 0.794 | 5.185 | 344.539 | 467.890 |
| WVHN | | | | | | | |
| SLNGAVHLYAQAQTG | 83 | 8.378 | 0.181 | 1.286 | 8.399 | 211.470 | 287.181 |
| WVHN | | | | | | | |
| TLNGAVHLYAQAQTG | 84 | 1.270 | 0.027 | 0.252 | 1.648 | 136.758 | 185.720 |
| WVHN | | | | | | | |
| ALNGAVHLYAQAQTG | 1081 | 13.477 | 0.290 | 0.084 | 0.546 | 9.629 | 13.077 |
| WVKN | | | | | | | |
| ALNGAVNLYAQAQTG | 85 | 4.203 | 0.091 | 0.000 | 0.000 | 3.919 | 5.323 |
| WVKN | | | | | | | |
| KLNGAVHLYAQAQTG | 86 | 7.153 | 0.154 | 0.000 | 0.000 | 9.576 | 13.004 |
| WVKN | | | | | | | |
| PHNGAVHLYAQAQTG | 87 | 1.248 | 0.027 | 0.378 | 2.467 | 5.661 | 7.688 |
| WVKN | | | | | | | |
| PINGAVHLYAQAQTG | 88 | 7.644 | 0.165 | 0.143 | 0.933 | 7.560 | 10.267 |
| WVKN | | | | | | | |
| PLKGAVHLYAQAQTG | 89 | 0.748 | 0.016 | 0.103 | 0.675 | 7.088 | 9.626 |
| WVKN | | | | | | | |
| PLNAAVHLYAQAQTG | 90 | 2.473 | 0.053 | 0.000 | 0.000 | 18.662 | 25.343 |
| WVKN | | | | | | | |
| PLNGAAHLYAQAQTG | 91 | 0.901 | 0.019 | 0.390 | 2.547 | 5.894 | 8.004 |
| WVKN | | | | | | | |
| PLNGADHLYAQAQTG | 92 | 3.270 | 0.070 | 0.316 | 2.064 | 0.970 | 1.317 |
| WVKN | | | | | | | |
| PLNGAGHLYAQAQTG | 93 | 0.378 | 0.008 | 0.209 | 1.367 | 11.306 | 15.354 |
| WVKN | | | | | | | |
| PLNGALHLYAQAQTG | 859 | 19.306 | 0.416 | 0.059 | 0.387 | 19.870 | 26.984 |
| WVKN | | | | | | | |
| PLNGAVDLYAQAQTG | 94 | 0.937 | 0.020 | 0.000 | 0.000 | 5.016 | 6.812 |
| WVKN | | | | | | | |
| PLNGAVHHYAQAQTG | 95 | 1.572 | 0.034 | 0.122 | 0.800 | 8.227 | 11.173 |
| WVKN | | | | | | | |
| PLNGAVHIYAQAQTG | 96 | 11.752 | 0.253 | 0.310 | 2.024 | 10.015 | 13.600 |
| WVKN | | | | | | | |
| PLNGAVHLDAQAQTG | 97 | 0.455 | 0.010 | 0.132 | 0.864 | 14.604 | 19.832 |
| WVKN | | | | | | | |
| PLNGAVHLNAQAQTG | 98 | 1.725 | 0.037 | 0.739 | 4.830 | 21.040 | 28.572 |
| WVKN | | | | | | | |
| PLNGAVHLSAQAQTG | 99 | 0.653 | 0.014 | 0.523 | 3.415 | 16.268 | 22.092 |
| WVKN | | | | | | | |
| PLNGAVHLYAEAQTG | 100 | 0.752 | 0.016 | 0.000 | 0.000 | 0.825 | 1.120 |
| WVKN | | | | | | | |
| PLNGAVHLYAHAQTG | 101 | 8.658 | 0.187 | 0.345 | 2.253 | 1.734 | 2.355 |
| WVKN | | | | | | | |
| PLNGAVHLYAKAQTG | 649 | 28.559 | 0.615 | 0.278 | 1.817 | 1.532 | 2.081 |
| WVKN | | | | | | | |
| PLNGAVHLYALAQTG | 102 | 2.311 | 0.050 | 0.000 | 0.000 | 9.892 | 13.433 |
| WVKN | | | | | | | |
| PLNGAVHLYAPAQTG | 103 | 3.766 | 0.081 | 0.000 | 0.000 | 5.697 | 7.737 |
| WVKN | | | | | | | |
| PLNGAVHLYAQAETG | 104 | 0.360 | 0.008 | 0.213 | 1.394 | 2.738 | 3.718 |
| WVKN | | | | | | | |
| PLNGAVHLYAQAQKG | 105 | 7.865 | 0.169 | 0.099 | 0.648 | 1.486 | 2.018 |
| WVKN | | | | | | | |
| PLNGAVHLYAQAQLS | 566 | 36.293 | 0.782 | 0.000 | 0.000 | 134.753 | 182.997 |
| PVKN | | | | | | | |
| PLNGAVHLYAQAQLS | 960 | 15.955 | 0.344 | 0.000 | 0.000 | 51.408 | 69.813 |
| SVKN | | | | | | | |
| PLNGAVHLYAQAQPG | 106 | 10.171 | 0.219 | 0.000 | 0.000 | 13.928 | 18.914 |
| WVKN | | | | | | | |
| PLNGAVHLYAQAQSG | 107 | 3.450 | 0.074 | 0.000 | 0.000 | 7.922 | 10.758 |
| WVKN | | | | | | | |
| PLNGAVHLYAQAQSS | 108 | 11.748 | 0.253 | 0.000 | 0.000 | 8.691 | 11.802 |
| LVKN | | | | | | | |
| PLNGAVHLYAQAQSS | 109 | 5.856 | 0.126 | 0.169 | 1.107 | 10.452 | 14.194 |
| SVKN | | | | | | | |
| PLNGAVHLYAQAQTA | 110 | 4.473 | 0.096 | 0.000 | 0.000 | 14.173 | 19.247 |
| CVKN | | | | | | | |
| PLNGAVHLYAQAQTA | 763 | 23.248 | 0.501 | 0.000 | 0.000 | 11.433 | 15.526 |
| SVKN | | | | | | | |
| PLNGAVHLYAQAQTA | 828 | 20.599 | 0.444 | 0.333 | 2.174 | 6.667 | 9.054 |
| WVKN | | | | | | | |
| PLNGAVHLYAQAQTE | 111 | 0.721 | 0.016 | 0.000 | 0.000 | 14.566 | 19.781 |
| WVKN | | | | | | | |
| PLNGAVHLYAQAQTG | 112 | 8.239 | 0.178 | 0.000 | 0.000 | 10.794 | 14.659 |
| AVKN | | | | | | | |
| PLNGAVHLYAQAQTG | 113 | 8.144 | 0.175 | 0.222 | 1.452 | 14.865 | 20.187 |
| CVKN | | | | | | | |
| PLNGAVHLYAQAQTG | 529 | 40.644 | 0.876 | 0.167 | 1.092 | 8.407 | 11.417 |
| GVKN | | | | | | | |
| PLNGAVHLYAQAQTG | 114 | 10.090 | 0.217 | 0.145 | 0.945 | 10.946 | 14.864 |
| LVKN | | | | | | | |
| PLNGAVHLYAQAQTG | 1100 | 13.059 | 0.281 | 0.000 | 0.000 | 2.607 | 3.541 |
| RVKN | | | | | | | |
| PLNGAVHLYAQAQTG | 631 | 29.707 | 0.640 | 0.516 | 3.369 | 7.169 | 9.735 |
| SVKN | | | | | | | |
| PLNGAVHLYAQAQTG | 765 | 23.167 | 0.499 | 0.260 | 1.700 | 10.937 | 14.852 |
| WVKN | | | | | | | |
| PLNGAVHLYAQAQTL | 720 | 25.032 | 0.539 | 1.771 | 11.569 | 10.981 | 14.913 |
| SVKN | | | | | | | |
| PLNGAVHLYAQAQTR | 1033 | 14.369 | 0.310 | 1.308 | 8.546 | 1.210 | 1.643 |
| WVKN | | | | | | | |
| PLNGAVHLYAQAQTS | 700 | 26.099 | 0.562 | 0.000 | 0.000 | 29.844 | 40.528 |
| SVKN | | | | | | | |
| PLNGAVHLYAQAQTS | 1037 | 14.347 | 0.309 | 0.000 | 0.000 | 12.484 | 16.953 |
| TVKN | | | | | | | |
| PLNGAVHLYAQAQTS | 115 | 4.212 | 0.091 | 0.000 | 0.000 | 34.651 | 47.056 |
| WVKN | | | | | | | |
| PLNGAVHLYAQAQTV | 625 | 30.131 | 0.649 | 0.000 | 0.000 | 22.666 | 30.781 |
| AVKN | | | | | | | |
| PLNGAVHLYAQAQTV | 325 | 69.266 | 1.492 | 0.231 | 1.508 | 22.335 | 30.332 |
| SVKN | | | | | | | |
| PLNGAVHLYAQAQTV | 771 | 22.784 | 0.491 | 0.000 | 0.000 | 1.612 | 2.189 |
| WVKN | | | | | | | |
| PLNGAVHLYAQAQVS | 610 | 31.581 | 0.680 | 0.354 | 2.310 | 21.595 | 29.326 |
| AVKN | | | | | | | |
| PLNGAVHLYAQAQVS | 558 | 37.158 | 0.801 | 0.000 | 0.000 | 40.525 | 55.033 |
| PVKN | | | | | | | |
| PLNGAVHLYAQEQTG | 116 | 7.694 | 0.166 | 0.000 | 0.000 | 1.548 | 2.102 |
| WVKN | | | | | | | |
| PLNGAVHLYAQSQTG | 117 | 7.014 | 0.151 | 0.000 | 0.000 | 5.931 | 8.054 |
| WVKN | | | | | | | |
| PLNGAVHLYDQAQTG | 118 | 2.761 | 0.059 | 0.146 | 0.956 | 7.745 | 10.518 |
| WVKN | | | | | | | |
| PLNGAVHLYEQAQTG | 119 | 7.658 | 0.165 | 0.000 | 0.000 | 7.124 | 9.675 |
| WVKN | | | | | | | |
| PLNGAVHLYGQAQTG | 120 | 0.874 | 0.019 | 0.000 | 0.000 | 5.745 | 7.802 |
| WVKN | | | | | | | |
| PLNGAVHLYSQAQTG | 121 | 6.910 | 0.149 | 0.000 | 0.000 | 11.682 | 15.865 |
| LVKN | | | | | | | |
| PLNGAVHLYSQAQTG | 122 | 7.536 | 0.162 | 0.245 | 1.599 | 4.415 | 5.996 |
| WVKN | | | | | | | |
| PLNGAVHLYTQAQTG | 123 | 0.595 | 0.013 | 0.166 | 1.086 | 10.157 | 13.793 |
| WVKN | | | | | | | |
| PLNGAVHPYAQAQTG | 124 | 0.788 | 0.017 | 0.178 | 1.162 | 3.527 | 4.790 |
| WVKN | | | | | | | |
| PLNGAVHRSLQAQTG | 125 | 0.153 | 0.003 | 0.449 | 2.931 | 7.938 | 10.780 |
| WVKN | | | | | | | |
| PLNGAVHRYAQAQTG | 126 | 1.878 | 0.040 | 0.000 | 0.000 | 2.446 | 3.322 |
| WVKN | | | | | | | |
| PLNGAVHVYAQAQTG | 127 | 1.937 | 0.042 | 0.123 | 0.802 | 7.871 | 10.689 |
| WVKN | | | | | | | |
| PLNGAVLLYAQAQTG | 128 | 4.149 | 0.089 | 0.211 | 1.379 | 3.878 | 5.266 |
| WVKN | | | | | | | |
| PLNGAVNLYAQAQTG | 129 | 3.505 | 0.076 | 0.000 | 0.000 | 1.145 | 1.555 |
| CVKN | | | | | | | |
| PLNGAVNLYAQAQTG | 130 | 4.586 | 0.099 | 0.262 | 1.710 | 2.124 | 2.884 |
| WVKN | | | | | | | |
| PLNGAVNLYDQAQTG | 131 | 2.486 | 0.054 | 0.000 | 0.000 | 9.468 | 12.858 |
| WVKN | | | | | | | |
| PLNGAVPLYAQAQTG | 132 | 1.622 | 0.035 | 0.000 | 0.000 | 7.002 | 9.509 |
| WVKN | | | | | | | |
| PLNGAVQLYAQAQTG | 133 | 2.014 | 0.043 | 0.381 | 2.487 | 11.888 | 16.145 |
| WVKN | | | | | | | |
| PLNGAVRSTAQAQTG | 134 | 0.505 | 0.011 | 0.662 | 4.326 | 24.950 | 33.883 |
| WVKN | | | | | | | |
| PLNGAVSLRAQAQTG | 135 | 0.725 | 0.016 | 1.267 | 8.277 | 6.291 | 8.543 |
| WVKN | | | | | | | |
| PLNGAVSSRAQAQTG | 136 | 0.739 | 0.016 | 1.091 | 7.130 | 19.478 | 26.452 |
| WVKN | | | | | | | |
| PLNGDVHLYAQAQTG | 14 | 2.905 | 0.063 | 0.000 | 0.000 | 10.919 | 14.829 |
| CVKN | | | | | | | |
| PLNGDVHLYAQAQTG | 15 | 2.559 | 0.055 | 0.235 | 1.539 | 9.737 | 13.224 |
| WVKN | | | | | | | |
| PLNGGVHLYAQAQTG | 864 | 19.077 | 0.411 | 0.292 | 1.905 | 4.576 | 6.214 |
| WVKN | | | | | | | |
| PLNGPVHLYAQAQTG | 16 | 2.216 | 0.048 | 0.000 | 0.000 | 5.169 | 7.019 |
| WVKN | | | | | | | |
| PLNGSVHLYAQAQTG | 17 | 5.707 | 0.123 | 0.000 | 0.000 | 21.281 | 28.900 |
| CVKN | | | | | | | |
| PLNGSVHLYAQAQTG | 791 | 22.050 | 0.475 | 0.184 | 1.202 | 13.110 | 17.803 |
| WVKN | | | | | | | |
| PLNGTVHLYAQAQTG | 978 | 15.482 | 0.334 | 0.000 | 0.000 | 17.576 | 23.868 |
| WVKN | | | | | | | |
| PLNSAVHLYAQAQTG | 1174 | 1.468 | 0.032 | 0.000 | 0.000 | 3.674 | 4.989 |
| WVKN | | | | | | | |
| PLSGAVHLYAQAQTG | 1175 | 0.680 | 0.015 | 0.000 | 0.000 | 8.111 | 11.015 |
| WVKN | | | | | | | |
| PPNGAVHLYAQAQTG | 1176 | 0.829 | 0.018 | 0.546 | 3.567 | 9.008 | 12.233 |
| WVKN | | | | | | | |
| PRNGAVHLYAQAQTG | 1177 | 1.194 | 0.026 | 0.421 | 2.751 | 9.143 | 12.417 |
| WVKN | | | | | | | |
| PVNGAVHLYAQAQTG | 1178 | 8.167 | 0.176 | 0.145 | 0.946 | 11.979 | 16.268 |
| WVKN | | | | | | | |
| QLNGAVHIYAQAQTG | 1179 | 6.982 | 0.150 | 0.000 | 0.000 | 14.405 | 19.563 |
| WVKN | | | | | | | |
| QLNGAVHLYAQAQTG | 1180 | 2.446 | 0.053 | 0.000 | 0.000 | 14.453 | 19.627 |
| CVKN | | | | | | | |
| QLNGAVHLYAQAQTG | 1181 | 7.518 | 0.162 | 0.000 | 0.000 | 1.613 | 2.190 |
| LVKN | | | | | | | |
| QLNGAVHLYAQAQTG | 966 | 15.815 | 0.341 | 1.130 | 7.380 | 3.272 | 4.443 |
| SVKN | | | | | | | |
| QLNGAVHLYAQAQTG | 1032 | 14.378 | 0.310 | 0.137 | 0.893 | 10.495 | 14.253 |
| WVKN | | | | | | | |
| QLNGAVHLYDQAQTG | 1182 | 2.378 | 0.051 | 0.000 | 0.000 | 1.224 | 1.663 |
| WVKN | | | | | | | |
| RLNGAVHLYAQAQTG | 1183 | 3.131 | 0.067 | 0.000 | 0.000 | 4.894 | 6.646 |
| WVKN | | | | | | | |
| SINGAVHLYAQAQTG | 1184 | 1.234 | 0.027 | 0.409 | 2.671 | 4.660 | 6.328 |
| WVKN | | | | | | | |
| SLNGAVHLYAQAQTG | 1185 | 6.104 | 0.132 | 0.328 | 2.143 | 11.122 | 15.104 |
| WVKN | | | | | | | |
| SLNGAVNLYAQAQTG | 1186 | 1.387 | 0.030 | 0.833 | 5.444 | 5.215 | 7.083 |
| WVKN | | | | | | | |
| TLNGAVHLYAQAQTG | 1187 | 2.176 | 0.047 | 0.108 | 0.707 | 5.355 | 7.272 |
| WVKN | | | | | | | |
| TLNGAVNLYAQAQTG | 1188 | 1.333 | 0.029 | 0.000 | 0.000 | 1.292 | 1.754 |
| WVKN | | | | | | | |
| PLNGAVHHYAQAQTG | 1189 | 0.937 | 0.020 | 0.000 | 0.000 | 982.466 | 1334.208 |
| WVPN | | | | | | | |
| PLNGAVHLNAQAQTG | 1190 | 3.698 | 0.080 | 3.072 | 20.072 | 5448.821 | 7399.606 |
| WVPN | | | | | | | |
| PLNGAVHLSAQAQTG | 1191 | 3.356 | 0.072 | 3.362 | 21.966 | 5527.158 | 7505.989 |
| WVPN | | | | | | | |
| PLNGAVHLYAQAQTG | 1192 | 8.959 | 0.193 | 0.969 | 6.329 | 3019.591 | 4100.664 |
| CVPN | | | | | | | |
| PLNGAVHLYAQAQTG | 314 | 71.770 | 1.546 | 2.071 | 13.534 | 2408.300 | 3270.518 |
| WVPN | | | | | | | |
| PLNGAVNLYAQAQTG | 1193 | 5.356 | 0.115 | 1.809 | 11.822 | 2103.432 | 2856.501 |
| WVPN | | | | | | | |
| PLNGTVHLYAQAQTG | 885 | 18.270 | 0.394 | 0.000 | 0.000 | 4688.758 | 6367.425 |
| WVPN | | | | | | | |
| PVNGAVHLYAQAQTG | 1016 | 14.568 | 0.314 | 0.000 | 0.000 | 1269.496 | 1724.000 |
| WVPN | | | | | | | |
| QLNGAVHLYAQAQTG | 648 | 28.572 | 0.616 | 0.000 | 0.000 | 14152.524 | 19219.405 |
| WVPN | | | | | | | |
| SLNGAVHLYAQAQTG | 1058 | 13.914 | 0.300 | 1.876 | 12.256 | 1800.081 | 2444.545 |
| WVPN | | | | | | | |
| PLNGAVHLYAQAQTG | 476 | 46.410 | 1 | 0.153 | 1 | 0.736 | 1 |
| WVQN | | | | | | | |
| AQAQAQTGWVQN | 1194 | 1 | 0.0215 | 1 | 6.533 | 1 | 1.358 |

### Example 5. Dose-Response Evaluation of TTD-001 in Non-Human Primates (NHPs)

[1844] This Example investigates the minimal dose of an AAV particle comprising a TTD-001 capsid variant (SEQ ID NO: 3623 (DNA) and 3636 (amino acid), comprising SEQ ID NO: 3648)) that is sufficient to achieve near-physiological expression of a payload, e.g., a single stranded payload, in the central nervous system of adult cynomolgus macaques (Macaca fascicularis) via intravenous systemic delivery.

[1845] AAV particles comprising the TTD-001 capsid variant comprising a single stranded viral genome encoding a hemagglutinin (HA)-tagged NHP protein under the control of a ubiquitous CBA promoter were injected intravenously into adult male NHPs (cynomolgus macaque) (n=3, 5-7 years of age) at various doses spanning a 30-fold range, which included 6.7e11 VG/kg, 2e12 VG/kg, 6.7e12 VG/kg, and 2e13 VG·kg. The in-life period was 28 days and then various CNS and peripheral tissues were collected for measuring transgene mRNA expression by RT-qPCR, viral DNA levels by ddPCR, transgene protein expression by ELISA, and biodistribution by immunohistochemistry (staining with an anti-HA antibody).

[1846] Widespread transgene expression was detected in the spinal cord and the brain the NHPs at doses of 2e12 VG/kg and above, especially in the putamen, thalamus, globus pallidus and brainstem (Tables 25-27). Viral DNA and mRNA were readily detectable in all NHPs and showed a consistent dose response (Table 25, Table 26).

[1847] More specifically, in the brain, dose-dependent distribution of the AAV particles comprising the TTD-001 capsid was observed in the cortical regions (frontal, motor, and somatosensory), caudate, putamen, thalamus, substantia nigra, globus pallidus, hippocampus, amygdala, hypothalamus, cerebellar cortex, and dentate nucleus. Additionally, for each dose administered, there was comparable distribution of the AAV particles comprising the TTD-001 capsid in each brain region, including the cortex as well as the deeper brain regions such as the caudate, putamen, thalamus, substantia nigra, globus pallidus, hippocampus, amygdala, hypothalamus, and dentate nucleus (Table 25).

[1848] With respect to the spinal cord, dose-dependent distribution of the AAV particles comprising the TTD-001 capsid was observed in the cervical, thoracic, and lumbar spinal cord regions and the relative distribution across all these regions was similar for each dosing group. As shown in Table 25, low biodistribution was measured in the DRG, but a dose-dependent distribution of the AAV particles comprising the TTD-001 capsid was observed in the cervical, thoracic, and lumbar DRG regions and the relative distribution across all DRG regions was similar for each dosing group.

[1849] With respect to the peripheral tissues, a dose-dependent distribution of the AAV particles comprising the TTD-001 capsid was observed in the liver, hear, and the vastus lateralis (muscle) (Table 25).

TABLE 25
Quantification of viral genomes (biodistribution) by
ddPCR following intravenous administration of various
doses of AAV particles comprising a TTD-001 capsid

| | Quantification of viral genomes in the Brain | | | | | | |
|---|---|---|---|---|---|---|---|
| | (VG/diploid cell) | | | | | | |
| | | | Somato- | | | | |
| Dose | Frontal | Motor | sensory | | Puta- | Thala- | Dentate |
| (VG/kg) | Cortex | Cortex | Cortex | Caudate | men | mus | Nucleus |
| 6.7e11 | 0.01 | 0.11 | 0.07 | 0.16 | 0.13 | 0.17 | 0.03 |
| 2e12 | 2.0 | 1.72 | 0.92 | 1.27 | 0.89 | 1.16 | 0.42 |
| 6.7e12 | 4.5 | 4.20 | 3.44 | 3.44 | 2.74 | 3.04 | 2.27 |
| 2e13 | 6.7 | 7.50 | 3.04 | 6.32 | 4.94 | 6.34 | 4.14 |

| Dose | Substantia | Globus | Hippo- | Amyg- | Hypo- | Cerebellar |
|---|---|---|---|---|---|---|
| (VG/kg) | Nigra | Pallidus | campus | dala | thalamus | Cortex |
| 6.7e11 | 0.12 | 0.10 | 0.1 | 0.16 | 0.14 | 0.02 |
| 2e12 | 1.12 | 1.28 | 2.1 | 2.83 | 1.77 | 0.13 |
| 6.7e12 | 2.33 | 2.47 | 2.6 | 4.38 | 2.37 | 0.53 |
| 2e13 | 5.81 | 4.43 | 5.5 | 6.13 | 4.63 | 4.18 |

| | Quantification of viral genomes in the | | | | | |
|---|---|---|---|---|---|---|
| | Spinal Cord and DRG (VG/diploid cell) | | | | | |
| | Cervical | Thoracic | Lumbar | | | |
| Dose | Spinal | Spinal | Spinal | Cervical | Thoracic | Lumbar |
| (VG/kg) | Cord | Cord | Cord | DRG | DRG | DRG |
| 6.7e11 | 0.06 | 0.03 | 0.05 | 0.002 | 0.003 | 0.007 |
| 2e12 | 0.74 | 0.42 | 0.64 | 0.007 | 0.006 | 0.019 |
| 6.7e12 | 1.35 | 0.94 | 1.58 | 0.015 | 0.022 | 0.033 |
| 2e13 | 5.35 | 3.48 | 6.48 | 0.060 | 0.079 | 0.070 |

| | |
|---|---|
| | Quantification of viral genomes |
| Dose | in the peripheral tissues (VG/diploid cell) |

| (VG/kg) | Heart | Liver | Kidney | Vastus lateralis (muscle) |
|---|---|---|---|---|
| 6.7e11 | 0.11 | 1.2 | 0.04 | 0.002 |
| 2e12 | 0.10 | 12.4 | 0.71 | 0.02 |
| 6.7e12 | 0.30 | 68.5 | 1.18 | 0.06 |
| 2e13 | 0.56 | 132.3 | 0.84 | 0.15 |

[1850] Additionally, dose-dependent transgene mRNA expression by the AAV particles comprising the TTD-001 capsid was observed in the brain, spinal cord, DRG, and peripheral tissues (Table 44). The lowest dose of the AAV particles comprising the TTD-001 capsid protein resulted in higher transgene mRNA and protein expression than a 30-fold higher dose of wild-type AAV9. Comparison of the transgene mRNA with the matching endogenous transcript indicated that a dose of 2e12VG/kg was sufficient to achieve supra-physiological levels in the central nervous system (CNS), while showing low transduction in the liver and the dorsal root ganglia (DRG) (Table 26).

TABLE 26
Quantification of transgene mRNA by RT-qPCR following
intravenous administration of various doses of
AAV particles comprising a TTD-001 capsid
Transgene mRNA relative to housekeeping gene

| | Dose (VG/kg) | | | |
|---|---|---|---|---|
| | 6.7e11 | 2e12 | 6.7e12 | 2e13 |
| Tissue | VG/kg | VG/kg | VG/kg | VG/kg |
| Frontal Cortex | 0.02 | 0.29 | 3.42 | 4.51 |
| Motor Cortex | 0.2 | 1.65 | 9.42 | 26.5 |
| Putamen | 0.11 | 0.38 | 1.76 | 2.52 |
| Dentate Nucleus | 0.01 | 0.26 | 4.38 | 15.8 |
| Cervical Spinal Cord | 0.07 | 0.63 | 2.25 | 8.26 |
| Thoracic Spinal Cord | 0.06 | 0.72 | 2.00 | 5.37 |
| Lumbar Spinal Cord | 0.10 | 0.83 | 6.71 | 27.22 |
| Cervical DRG | 0.02 | 0.29 | 0.99 | 3.58 |
| Thoracic DRG | 0.01 | 0.28 | 1.08 | 4.36 |
| Lumbar DRG | 0.02 | 0.56 | 2.21 | 4.44 |
| Heart | 0.002 | 0.33 | 5.37 | 11.45 |
| Liver | 0.04 | 0.3 | 1.43 | 2.22 |

Transgene mRNA vs. endogenous transcript
(fold change relative to vehicle control)

| | Dose (VG/kg) | | | | |
|---|---|---|---|---|---|
| | | 6.7e11 | 2e12 | 6.7e12 | 2e13 |
| Tissue | Vehicle | VG/kg | VG/kg | VG/kg | VG/kg |
| Frontal Cortex | 1.0 | 0.97 | 2.04 | 12.79 | 17.04 |
| Motor Cortex | 1.0 | 2.3 | 9.4 | 42.0 | 118.3 |
| Putamen | 1.0 | 1.59 | 3.00 | 11.25 | 16.57 |
| Dentate Nucleus | 1.0 | 0.7 | 1.7 | 17.0 | 59.9 |
| Cervical Spinal Cord | 1.0 | 1.18 | 2.65 | 12.57 | 43.16 |
| Thoracic Spinal Cord | 1.0 | 1.07 | 2.26 | 10.61 | 27.96 |
| Lumbar Spinal Cord | 1.0 | 1.16 | 3.06 | 31.30 | 122.75 |
| Cervical DRG | 1.0 | 1.0 | 1.63 | 3.24 | 9.09 |
| Thoracic DRG | 1.0 | 0.98 | 1.4 | 3.02 | 7.72 |
| Lumbar DRG | 1.0 | 1.05 | 2.3 | 4.78 | 11.72 |
| Heart | 1.0 | 1.34 | 1.67 | 6.55 | 13.57 |
| Liver | 1.0 | 0.9 | 1.2 | 2.8 | 3.2 |

TABLE 27
Quantification of total transgene protein expression in the peripheral
tissues by ELISA following intravenous administration of various
doses of AAV particles comprising a TTD-001 capsid

| | Cervical DRG | Heart | Liver |
|---|---|---|---|
| | (Transgene | (Transgene | (Transgene |
| Dose | ng/mL relative | ng/mL relative | ng/mL relative |
| (VG/kg) | to vehicle) | to vehicle) | to vehicle) |
| Vehicle | 1.0 | 1.0 | 1.0 |
| 6.7e11 | 1.1 | 1.0 | 0.87 |
| 2e12 | 1.5 | 1.04 | 1.00 |
| 6.7e12 | 1.7 | 2.23 | 0.93 |
| 2e13 | 7.4 | 3.69 | 1.24 |

[1851] By immunohistochemistry (JHC), widespread transduction by AAV particles comprising the TTD-001 capsid variant was observed in multiple brain regions of the NHPs as compared to AAV9 at all doses administered, particularly at the medium to high doses (2e12 VG/kg, 6.7e12 VG/kg, and 2e13 VG/kg). By JHC, dose dependent expression of AAV particles comprising the TTD-001 capsid variant was observed in the brain, specifically in the temporal cortex, caudate, putamen, thalamus, substantia nigra, hippocampus, and cerebellar. Morphologically, transgene expression was observed in the neuronal cell body and the neuropil from neurons in these brain regions, including the Purkinje neurons in the cerebellar cortex and the neurons deep in the cerebellar nuclei. In the brain stem, the transgene expression was observed in various structures including the gracile-nuclei, cuneate-nuclei, and the Inferior Olivary complex.

[1852] In the spinal cord of the NHPs, dose dependent transduction was also observed in the cervical, lumbar, and thoracic regions when measured by IHC, with the most intense and widespread staining occurring at the 6.7e12 VG/kg and 2e13 VG/kg doses. Substantial staining of the motor neurons in the spinal cord was also observed at the lower dose of 2e12 VG/kg. Furthermore, the cellular tropism of the TTD-001 capsid in the spinal cord appeared to be largely neuronal and neuropil at all doses in all regions (e.g., cervical, thoracic, and lumbar) investigated.

[1853] In the DRG of the NHPs, dose dependent transduction was also observed in the cervical, lumbar, and thoracic regions, with the most staining occurring at the 6.7e12 VG/kg and 2e13 VG/kg doses. The lower dose of 2e12 VG/kg showed significantly less staining and was comparable to particles comprising an AAV9 capsid that were administered at a higher dose of 2e13 VG/kg. The cellular tropism of the TTD-001 capsid in the DRG appeared to be largely neuronal at all doses in all regions investigated.

[1854] Transduction of AAV particles comprising the TTD-001 capsid variant was also measured by IHC in various peripheral tissues of the NHPs. In the liver, the transduction observed was more variable but appeared to follow a dose-dependent trend and appeared to be lower than by particles comprising an AAV9 capsid that were administered at a dose of 2e13 VG/kg. Minimal staining was observed in the quadriceps at all doses tested. In the heart, a dose-dependent trend in transduction was also observed.

[1855] Additionally, the staining of various cells in the brain and/or spinal cord following transduction with the AAV particles comprising the TTD-001 capsid at the doses investigated was quantified. As shown in FIG. 9B, a dose of 2e13 VG/kg was sufficient to transduce >40% of total cells in highly permissive brain regions (thalamus, caudate, putamen) and >20% total cells in less permissive regions (entorhinal cortex, auditory cortex, hippocampus). Even at a lower dose of 6.7e12, this was sufficient to transduce >20% of cells in the thalamus, caudate, putamen, and cerebellum (FIG. 9A). As shown in FIG. 9C, the dose of 2e13 VG/kg also resulted in transduction of >90% SMI311-positive neurons in the thalamus, dentate and spinal cord.

[1856] Together, these data demonstrate that variant AAV capsids, including TTD-001, can achieve a large improvement of their therapeutic index by retaining strong efficacy at low dose.

### Example 6. Spatial-omics Study of SOD1 mRNA Knockdown in Lumbar Motor Neurons after Intra-Cisterna Magna Delivery of an AAV in Cynomolgus Macaques

[1857] The goal of these experiments was to determine if intra-cisterna magna (ICM) delivery of an AAV.amiRNA vector to non-human primates (NHP; cynomolgus macaques) could achieve knockdown of endogenous SOD1 in lumbar spinal cord motor neurons in a dose-dependent manner. Additionally, several technologies with the potential for high spatial resolution were compared for their ability to detect SOD1 knockdown in motor neurons including: Digital Spatial Profiler (DSP, Nanostring Technologies), in-situ hybridization (ISH; Advanced Cell Diagnostics, RNAscope), Laser Capture Micro-dissection (LCM) followed by RT-qPCR, and spatial transcriptomics (10× Genomics, Visium platform).

[1858] Targeted delivery of adeno-associated virus (AAV) gene therapy using an AAV9-SOD1-shRNA vector to the motor cortex of SOD1^{G93A} rats, a model of human SOD1-ALS, resulted in delay of disease onset, expansion of lifespan and enhanced survival of spinal motor neurons (Thomsen et al., “Delayed Disease Onset and Extended Survival in the SOD1^{G93A} Rat Model of Amyotrophic Lateral Sclerosis after Suppression of Mutant SOD1 in the Motor Cortex” J. Neurosci. 34(47):15587-15600 (2014), which is hereby incorporated by reference in its entirety). Intracerebroventricular (ICV) antisense oligonucleotide (ASO) therapy targeting SOD1 reverses loss of muscle action potentials in SOD1^{G93A} mice and attenuates neurodegeneration (McCampbell et al. “Antisense oligonucleotides extend survival and reverse decrement in muscle response in ALS models” J Clin Invest. 128(8):3558-3567 (2018), which is hereby incorporated by reference in its entirety).

[1859] It is herein hypothesized that therapeutic strategies reducing mutant SOD1 could provide clinically beneficial outcomes to ALS patients. Patzke reported on the selection of a gene therapy vector targeting SOD1 using an artificial miRNA approach (amiRNA) and showed significant reduction of SOD1 after intra-parenchymal dosing into the pig spinal cord (Patzke et al., “C75 Robust SOD1 knockdown in large mammal spinal cord using a novel delivery paradigm with AAV gene therapy targeting SOD1 for the treatment of SOD1 ALS” Platform Communication, Preclinical therapeutic strategies, 59, MND and ALS Conference (2018), which is hereby incorporated by reference in its entirety).

[1860] The present experiment was designed to assess the utility of ICM delivery of an AAV gene therapy vector to lower SOD1 in motor neurons of cynomolgus macaques, as well as to compare the sensitivity and specificity of spatial-omics technologies to study SOD1 knockdown, specifically in motor neurons of the lumbar spinal cord.

[1861] Two doses of the AAV.SOD1-amiRNA vector or the vehicle (control) were administered via intra-cisterna magna (ICM) route in NHP and tissues were collected after 28 days for subsequent analysis. 14 um frozen cross sections of the hemi-sected Lumbar L2 spinal cords were used for Laser Capture Microdissection (LCM) to collect approximately 180 motor neurons from each animal for subsequent SOD1 mRNA analysis by RT-qPCR. 5 um formalin fixed paraffin embedded (FFPE) cross sections of the hemi-sected Lumbar L2 spinal cords were used for Digital Spatial Profiler (DSP) to collect approximately 96 motor neurons from each animal for SOD1 gene counts using nCounter (Nanostring). 5 um FFPE cross sections of the hemi-sected Lumbar L2 spinal were used for ISH (RNAscope) to study SOD1 mRNA expression in motor neurons identified by ChAT immunohistochemistry (ChAT IHC). Additionally, the spatial-omics technologies were compared to investigate the potential for high spatial resolution assays to detect SOD1 knockdown in motor neurons.

[1862] Digital Spatial Profiling of ChAT-positive lumbar motor neurons showed substantial and dose-dependent knockdown of SOD1 mRNA in fixed sections. Similarly, LCM motor neuron pools demonstrated SOD1 reduction in frozen sections. For both DSP and LCM methods, optimal housekeeping genes for normalization were determined. Furthermore, RNAscope in-situ hybridization showed a decrease in SOD1 mRNA signal in large ventral horn motor neurons of the lumbar spinal cord.

[1863] The data showed dose-dependent and robust knockdown of endogenous SOD1 in the motor neurons of Lumbar L2 spinal cord after intra-cisterna magna (ICM) delivery of AAV.SOD1 amiRNA to non-human primates (NHP; cynomolgus macaques).

[1864] LCM of motor neurons (FIGS. 1A-1D), ISH (FIG. 2), and DSP of ChAT-positive motor neurons (FIGS. 3A-3C) demonstrated sensitive and specific knockdown of SOD1 mRNA with near single cell resolution, given the large size of these neurons. These findings in NHPs support the use of ICM AAV RNAi gene therapy targeting SOD1 as a potential approach for the treatment of SOD1-ALS.

### Example 7: SOD1 mRNA Knockdown by Intravenous Administration of AAV

[1865] In this Example, primary endpoints (body weight, neurological scoring, survival, functional endpoints, and immunohistochemistry) following SOD1 mRNA knockdown by intravenous delivery of AAV were assessed in a SOD1^{G93A} transgenic mouse ALS model. This mouse model expresses a large amount of mutant SOD1 and exhibits adult-onset neurodegeneration of spinal motor neurons and progressive motor deficits leading to paralysis.

[1866] Briefly, B6.Cg-Tg(SOD1^{G93A})1Gur mice and wild-type non-carrier mice aged about 52 days were balanced for sex, age, copy number, and body weight. Mice were intravenously administered an SOD1 miRNA-encoding AAV particle with a VOY101 capsid and a viral genome (SEQ ID NO: 109, Table 15) encoding the SOD1 targeting modulatory polynucleotide miR104-788.2 (SEQ ID NO: 2562, Table 14) under the control of an H1 promoter (AAV_VOY101.SOD1). To assess vector distribution and pharmacodynamic effects of SOD1 miRNA, upper and lower regions of the cervical, thoracic, and lumbar spinal cord were harvested at necropsy, frozen in liquid nitrogen, and stored at −80° C. until use. The lower region of each segment was homogenized, aliquoted, and both whole cell DNA and total RNA were independently isolated from the same homogenate. The experimental design is summarized in Table 28.

TABLE 28
Experimental design.

| | | | | Dose | Volume | | |
|---|---|---|---|---|---|---|---|
| Group | Genotype | Test article | Route | (VG/kg) | (ul) | N | Readout |
| WT-V | WT-B6SJL mice (B6.Cg- | Vehicle | IV | 0 | 100 | 10M/10F | Body weight, |
| | Tg(SOD1^{G93A})1Gur non- | | | | | | survival, motor |
| | carriers) | | | | | | endpoints, IHC |
| V | B6.Cg-Tg(SOD1^{G93A})1Gur | Vehicle | IV | 0 | 100 | 12M/12F | |
| C | B6.Cg-Tg(SOD1^{G93A})1Gur | AAV_VOY1 | IV | 2E13 | 100 | 12M/12F | |
| | | 01.SOD1 | | | | | |
| A | B6.Cg-Tg(SOD1^{G93A})1Gur | AAV_VOY1 | IV | 6.3E12 | 100 | 12M/12F | |
| | | 01.SOD1 | | | | | |
| B | B6.Cg-Tg(SOD1^{G93A})1Gur | AAV_VOY1 | IV | 2E12 | 100 | 12M/12F | |
| | | 01.SOD1 | | | | | |

### Spinal Cord Vector Genome Distribution

[1867] Distribution of the SOD1 miRNA AAV particle after intravenous administration in SOD1^{G93A} transgenic mice was assessed using a multiplex ddPCR assay against the transgene and host targets. As shown in FIGS. 4A-4C, nearly identical vector distribution was observed for each treatment group in all spinal cord segments assessed (lower cervical, lower thoracic, and lower lumbar spinal cord). There was a 2-fold difference in mean vector distribution between the 2E13 and 6.3E12 vg/kg groups (Groups C and A) in all spinal cord segments, and a significant difference between the 2E13 and 2E12 vg/kg Groups (Groups C and B; 1-way ANOVA/Tukey's multiple comparisons). The difference in mean vector distribution between the 6.3E12 and 2E12 vg/kg groups (Groups A and B) was at least 6-fold.

SOD1 mRNA Reduction in Spinal Cord

[1868] FIGS. 5A-5C show the amount of human SOD1 mRNA reduction in the spinal cord of SOD1^{G93A} transgenic mice after intravenous administration of the SOD1 miRNA AAV particle. A dose-dependent hSOD1 mRNA reduction was observed for the range of dosages tested (2E12 to 2E13 vg/kg). There was a significant decrease in hSOD1 knockdown between the 2E13 and 6.3E12 vg/kg groups (Groups C and A, respectively) and the control group (V) in all spinal cord regions tested, and between the 2E13 and 2E12 vg/kg groups (Groups C and B, respectively; 1-way ANOVA and Tukey's multiple comparisons). The amount of knockdown was about 70% in the 2E13 vg/kg group (Group C), about 50% in the 6.3E12 vg/kg group (Group A), and about 20% in the 2E12 vg/kg group (Group B), with a similar amount of reduction in hSOD1 mRNA for each group across spinal cord regions.

Efficacy of SOD1 miRNA in Mouse ALS model

[1869] Effects of the SOD1 miRNA AAV particle delivered intravenously on various features of the SOD1^{G93A} transgenic mouse model were tested.

[1870] As shown in FIGS. 6A-6C, there was a clear correlation between SOD1 mRNA level and vector distribution over 2 logs of administered vector for all three spinal cord regions assessed. About 75% knockdown was observed in the cervical and thoracic spinal cord (slightly higher than in the lumbar spinal cord), with an IC50 (˜62.5% KD) of about 2 vg/dg based on a 4-parameter nonlinear curve fit (IC50 lower cervical: 2.01 vg/dg, range: 1.58-2.61 vg/dg; IC50 lower thoracic: 1.86 vg/dg, range: 1.38-2.55 vg/dg); IC50 lower lumbar: 3.21 vg/dg, range: 2.54-4.42 vg/dg).

[1871] Functional outcomes were also assessed in SOD1^{G93A} mice intravenously administered the SOD1 miRNA AAV particle.

[1872] Neuroscore composite rating assessments were performed on female and male SOD1^{G93A} mice. This protocol encompassing a simple neurological scoring system designed to assess motor performance (including circling, clasping, motility, general condition, righting reflex, paw placement, contralateral reflex, visual forepaw reaching, and contralateral rotation), with a scale ranging from 0-4, with 0=no deficit, 1=first symptoms, 2=onset of paresis, 3=paralysis, and 4=human endpoint. A dose-dependent improvement was observed in Neuroscore composite rating in both males and females, although the dose-dependency was more pronounced in female mice (FIG. 7). Male mice may have exhibited a more severe phenotype and progressed pathology at the time of AAV particle administration, resulting in heightened sensitivity to SOD1 miRNA expression and a bell-shaped efficacy curve.

[1873] Similarly, improvement in survival was observed in female, male, and all SOD1^{G93A} mice intravenously administered the SOD1 miRNA AAV particle (FIGS. 8A-8C). In female mice, median survival was 140 days for the vehicle-treated group and 139 days for the 2E12 vg/kg group. Median survival for the 6.3E12 vg/kg and 2E13 vg/kg groups could not be calculated at age 300 days due to >50% of the cohort remaining at this time point. There were surviving female mice for all doses tested at age day 300, with the 6.3E12 vg/kg group and 2E13 vg/kg group showing a similar higher probability of survival than the 2E12 vg/kg group (FIG. 8A). In male mice, median survival was 133 days for the vehicle-treated group, 124 (n.s.) and 145 (n.s.) days for the 2E13 vg/kg and 2E12 vg/kg groups, respectively, and 263 (**p=0.003) days for the 6.3E12 vg/kg group. In males, the 6.3E12 vg/kg group showed the greatest number of surviving mice at age 300 days, followed by the 2E13 vg/kg group, whereas all 2E12 vg/kg mice had died by about age 280 days (FIG. 8B). Statistical analysis was performed using the log-rank (Mantel-Cox) test. When combining the data for both males and females, while vehicle-administered SOD1^{G93A} mice died before age 160 days, surviving mice were observed for all SOD1 miRNA AAV particle groups, with the largest number of mice surviving at age 280 days in the 6.3E12 vg/kg group. The least number of surviving mice was observed with the 2E12 vg/kg group at age 280 days (FIG. 8C).

[1874] Grip strength was also assessed (FIGS. 9A, 9B, 10A, 10B). Grip strength provides a measure of forepaw and hindlimb muscle strength by measuring the forced required to pull the mouse off a narrow bar or grid. The apparatus used to test grip strength consists of a grasping bar connected to a force transducer. Each animal underwent five trials, and the mean value was calculated. Mice that are no longer able to grab the bar or grid due to disease progression were removed from the experiment, as was the case in the 2E13 vg/kg treatment group in both males and females. In both female and male SOD1^{G93A} mice, the intermediate dose of 6.3E12 vg/kg had the strongest effect of maintaining near wild-type levels of grip strength for both forelimb and all limbs combined at day 130 of age. In female mice, the 2E12 vg/kg dose showed no improvement in grip strength, with a trend similar to vehicle administered mice, while in male mice, a clear improvement in grip strength was observed at this dose. These data are consistent with other behavioral findings, suggesting female mice are more responsive to higher doses of AAV particle, while male mice are more susceptible to overexpression of SOD1 miRNA and do not tolerate the highest dose (2E13 vg/kg).

[1875] Overall, these studies demonstrated robust SOD1 knockdown throughout the rostral-caudal extent of the spinal cord that correlated with vector genome levels and significant improvements in motor performance and survival extension. These results suggest that the combination of potent and tolerable AAV miRNA mediated knockdown with intravenous dosing of a BBB-penetrant capsid demonstrates substantial phenotypic rescue in an SOD1-ALS mouse model.

### Example 8: SOD1 mRNA Knockdown by SOD1 miRNA Expressed Under Different Promoters

[1876] In this example, SOD1 mRNA knockdown was assessed by measuring the remaining SOD1 mRNA in HEK293T and SH-SY5Y cell lines. Briefly, HEK293T and SH-SY5Y cells were plated at 15,000 cell density in 96-well plate. Next day, cells were treated with SOD1 miRNA-encoding AAV particle with a AAV2 capsid and a viral genome (Table 16 and 17) encoding the SOD1 targeting modulatory polynucleotide miR104-788.2 (SEQ ID NO: 2562, Table 14) under the control of an H1 promoter (AAV_VOY101.SOD1) (Table 16) or other Pol II promoters (CBA, miniCBA, miniEF1AV2, PGK, MP84, hSYN, CBA_CpG depleted exon, miniCBA_CpG depleted exon, miniEF1AV2_CpGdepleted exon, PGK_CpG depleted exon, MP84_CpGdepleted exon and hSYN_CpG depleted exon, the sequences are included in Table 17). Two days after AAV particle treatment, the cells were harvested and total RNA were extracted to measure the SOD1 mRNA levels by qRT-PCR. We observed a dose dependent SOD1 mRNA knockdown (KD) in both HEK293T and SH-SY5Y cells. SOD1 KD was the highest for miRNAs that were expressed under H1 (Pol III) promoter with almost 95% KD at both MOIs tested. For the Pol II promoters that we tested, the KD levels were the following: CBA=CBA_CpG depleted exon>miniEF1AV2=miniEF1AV2_CpGdepleted exon>PGK=PGK_CpG depleted exon>miniCBA=miniCBA_CpGdepleted exon>hSYN=hSYN_CpG depleted exon>MP84=MP84_CpG depleted. A significant difference was not observed between the transgenes that has full CpG amount and decreased CpG amount (for the transgenes that have depleted CpG in exonic regions of the transgenes).

### Example 9 SOD1 mRNA Knockdown by Intravenous Administration of AAV

[1877] In this example, primary endpoints (vector genome tissue distribution, vector genome cellular tropism, and SOD1 mRNA reduction in various tissues) will be assessed following intravenous administration of the AAV capsid variants described herein. Briefly, cynomolgus macaques (Macaca fascicularis) aged 2-5 years and weighing 2-4 kg will be used for the study. Approximately three weeks before the dosing date, 1 ml of blood will be collected for serum preparation from a sufficient number of animals with normal physical examinations, clinical chemistries, and complete blood counts (CBCs) for a neutralizing antibody (Nab) screening using standard protocols. The serologically qualified animals will be assigned to the study. Animals will be randomized across low (1×1012 vg/kg), mid (3×1012 vg/kg), and high (1×1013 vg/kg) dose groups for each capsid variant, as well as a vehicle control. Each subject will receive a single intravenous infusion via saphenous or cephalic vein using an infusion pump on Day 0, with a target infusion rate of 5 ml/kg/hour. A selected group of tissues will be harvested on day 28 post AAV administration, with special attention being taken for the processing of the brain and spinal cord. To assess vector distribution and pharmacodynamic effects of SOD1 miRNA, cervical, thoracic, and lumbar spinal cord sections will be harvested. To assess cellular tropism of the miRNA, the even numbered cervical, thoracic, and lumbar spinal cord sections will be harvested. Additional CNS regions/tissues will be assessed (e.g., motor cortex and brainstem), along with an extensive list of peripheral tissues. Distribution of the SOD1 miRNA AAV particle will be assessed using a multiplex ddPCR assay against the transgene and host targets. In situ hybridization will be utilized to detect cellular distribution of the miRNA and resulting SOD1 reduction.

### XI. Equivalents and Scope

[1878] Those skilled in the art will recognize, or be able to ascertain using no more than routine experimentation, many equivalents to the specific embodiments in accordance with the Detailed Description provided herein. The scope of the present disclosure is not intended to be limited to the above Detailed Description, but rather is as set forth in the appended claims.

[1879] In the claims, articles such as “a,” “an,” and “the” may mean one or more than one unless indicated to the contrary or otherwise evident from the context. Claims or descriptions that include “or” between one or more members of a group are considered satisfied if one, more than one, or all of the group members are present in, employed in, or otherwise relevant to a given product or process unless indicated to the contrary or otherwise evident from the context. The disclosure includes embodiments in which exactly one member of the group is present in, employed in, or otherwise relevant to a given product or process. The disclosure includes embodiments in which more than one, or the entire group members are present in, employed in, or otherwise relevant to a given product or process.

[1880] It is also noted that the term “comprising” is intended to be open and permits but does not require the inclusion of additional elements or steps. When the term “comprising” is used herein, the term “consisting of” is thus also encompassed and disclosed.

[1881] Where ranges are given, endpoints are included. Furthermore, it is to be understood that unless otherwise indicated or otherwise evident from the context and understanding of one of ordinary skill in the art, values that are expressed as ranges can assume any specific value or subrange within the stated ranges in different embodiments of the disclosure, to the tenth of the unit of the lower limit of the range, unless the context clearly dictates otherwise.

[1882] In addition, it is to be understood that any particular embodiment of the present disclosure that falls within the prior art may be explicitly excluded from any one or more of the claims. Since such embodiments are deemed to be known to one of ordinary skill in the art, they may be excluded even if the exclusion is not set forth explicitly herein. Any particular embodiment of the compositions of the disclosure (e.g., any, composition, therapeutic or active ingredient; any method of production; any method of use; etc.) can be excluded from any one or more claims, for any reason, whether or not related to the existence of prior art.

[1883] It is to be understood that the words which have been used are words of description rather than limitation, and that changes may be made within the purview of the appended claims without departing from the true scope and spirit of the disclosure in its broader aspects.

[1884] While the present disclosure has been described at some length and with some particularity with respect to the several described embodiments, it is not intended that it should be limited to any such particulars or embodiments or any particular embodiment, but it is to be construed with references to the appended claims so as to provide the broadest possible interpretation of such claims in view of the prior art and, therefore, to effectively encompass the intended scope of the disclosure.

[1885] All publications, patent applications, patents, and other references mentioned herein are incorporated by reference in their entirety. In case of conflict, the present specification, including definitions, will control. In addition, section headings, the materials, methods, and examples are illustrative only and not intended to be limiting.

The application's sequence listing, which the Patent Office published only in electronic form, follows.

SEQUENCE LISTING (5123 sequences)

SEQ ID NO: 1 - protein, 743 aa, Adeno-associated virus
MAADGYLPDWLEDNLSEGIREWWALKPGAPQPKANQQHQDNARGLVLPGYKYLGPGNGLDKGEPVNAADAAALEHDKAYDQQLKAGDNPYLKYNHADAEFQERLKEDTSFGGNLGRAVFQAKKRLLEPLGLVEEAAKTAPGKKRPVEQSPQEPDSSAGIGKSGAQPAKKRLNFGQTGDTESVPDPQPIGEPPAAPSGVGSLTMASGGGAPVADNNEGADGVGSSSGNWHCDSQWLGDRVITTSTRTWALPTYNNHLYKQISNSTSGGSSNDNAYFGYSTPWGYFDFNRFHCHFSPRDWQRLINNNWGFRPKRLNFKLFNIQVKEVTDNNGVKTIANNLTSTVQVFTDSDYQLPYVLGSAHEGCLPPFPADVFMIPQYGYLTLNDGSQAVGRSSFYCLEYFPSQMLRTGNNFQFSYEFENVPFHSSYAHSQSLDRLMNPLIDQYLYYLSKTINGSGQNQQTLKFSVAGPSNMAVQGRNYIPGPSYRQQRVSTTVTQNNNSEFAWPGASSWALNGRNSLMNPGPAMASHKEGEDRFFPLSGSLIFGKQGTGRDNVDADKVMITNEEEIKTTNPVATESYGQVATNHQSDGTLAVPFKAQAQTGWVQNQGILPGMVWQDRDVYLQGPIWAKIPHTDGNFHPSPLMGGFGMKHPPPQILIKNTPVPADPPTAFNKDKLNSFITQYSTGQVSVEIEWELQKENSKRWNPEIQYTSNYYKSNNVEFAVNTEGVYSEPRPIGTRYLTRNL

SEQ ID NO: 2-4 - skipped (3 entries)

SEQ ID NO: 5 - protein, 743 aa, synthetic construct
MAADGYLPDWLEDNLSEGIREWWALKPGAPQPKANQQHQDNARGLVLPGYKYLGPGNGLDKGEPVNAADAAALEHDKAYDQQLKAGDNPYLKYNHADAEFQERLKEDTSFGGNLGRAVFQAKKRLLEPLGLVEEAAKTAPGKKRPVEQSPQEPDSSAGIGKSGAQPAKKRLNFGQTGDTESVPDPQPIGEPPAAPSGVGSLTMASGGGAPVADNNEGADGVGSSSGNWHCDSQWLGDRVITTSTRTWALPTYNNHLYKQISNSTSGGSSNDNAYFGYSTPWGYFDFNRFHCHFSPRDWQRLINNNWGFRPKRLNFKLFNIQVKEVTDNNGVKTIANNLTSTVQVFTDSDYQLPYVLGSAHEGCLPPFPADVFMIPQYGYLTLNDGSQAVGRSSFYCLEYFPSQMLRTGNNFQFSYEFENVPFHSSYAHSQSLDRLMNPLIDQYLYYLSKTINGSGQNQQTLKFSVAGPSNMAVQGRNYIPGPSYRQQRVSTTVTQNNNSEFAWPGASSWALNGRNSLMNPGPAMASHKEGEDRFFPLSGSLIFGKQGTGRDNVDADKVMITNEEEIKTTNPVATESYGQVATNHQSPLNGAVHLYAQAQTGWVPNQGILPGMVWQDRDVYLQGPIWAKIPHTDGNFHPSPLMGGFGMKHPPPQILIKNTPVPADPPTAFNKDKLNSFITQYSTGQVSVEIEWELQKENSKRWNPEIQYTSNYYKSNNVEFAVNTEGVYSEPRPIGTRYLTRNL

SEQ ID NO: 6-7 - skipped (2 entries)

SEQ ID NO: 8 - protein, 743 aa, synthetic construct
MAADGYLPDWLEDNLSEGIREWWALKPGAPQPKANQQHQDNARGLVLPGYKYLGPGNGLDKGEPVNAADAAALEHDKAYDQQLKAGDNPYLKYNHADAEFQERLKEDTSFGGNLGRAVFQAKKRLLEPLGLVEEAAKTAPGKKRPVEQSPQEPDSSAGIGKSGAQPAKKRLNFGQTGDTESVPDPQPIGEPPAAPSGVGSLTMASGGGAPVADNNEGADGVGSSSGNWHCDSQWLGDRVITTSTRTWALPTYNNHLYKQISNSTSGGSSNDNAYFGYSTPWGYFDFNRFHCHFSPRDWQRLINNNWGFRPKRLNFKLFNIQVKEVTDNNGVKTIANNLTSTVQVFTDSDYQLPYVLGSAHEGCLPPFPADVFMIPQYGYLTLNDGSQAVGRSSFYCLEYFPSQMLRTGNNFQFSYEFENVPFHSSYAHSQSLDRLMNPLIDQYLYYLSKTINGSGQNQQTLKFSVAGPSNMAVQGRNYIPGPSYRQQRVSTTVTQNNNSEFAWPGASSWALNGRNSLMNPGPAMASHKEGEDRFFPLSGSLIFGKQGTGRDNVDADKVMITNEEEIKTTNPVATESYGQVATNHQSPLNGAVHLYAQAQLSPVKNQGILPGMVWQDRDVYLQGPIWAKIPHTDGNFHPSPLMGGFGMKHPPPQILIKNTPVPADPPTAFNKDKLNSFITQYSTGQVSVEIEWELQKENSKRWNPEIQYTSNYYKSNNVEFAVNTEGVYSEPRPIGTRYLTRNL

SEQ ID NO: 9-10 - skipped (2 entries)

SEQ ID NO: 11 - protein, 736 aa, synthetic construct
MAADGYLPDWLEDNLSEGIREWWALKPGAPQPKANQQHQDNARGLVLPGYKYLGPGNGLDKGEPVNAADAAALEHDKAYDQQLKAGDNPYLKYNHADAEFQERLKEDTSFGGNLGRAVFQAKKRLLEPLGLVEEAAKTAPGKKRPVEQSPQEPDSSAGIGKSGAQPAKKRLNFGQTGDTESVPDPQPIGEPPAAPSGVGSLTMASGGGAPVADNNEGADGVGSSSGNWHCDSQWLGDRVITTSTRTWALPTYNNHLYKQISNSTSGGSSNDNAYFGYSTPWGYFDFNRFHCHFSPRDWQRLINNNWGFRPKRLNFKLFNIQVKEVTDNNGVKTIANNLTSTVQVFTDSDYQLPYVLGSAHEGCLPPFPADVFMIPQYGYLTLNDGSQAVGRSSFYCLEYFPSQMLRTGNNFQFSYEFENVPFHSSYAHSQSLDRLMNPLIDQYLYYLSRTINGSGQNQQTLKFSVAGPSNMAVQGRNYIPGPSYRQQRVSTTVTQNNNSEFAWPGASSWALNGRNSLMNPGPAMASHKEGEDRFFPLSGSLIFGKQGTGRDNVDADKVMITNEEEIKTTNPVATESYGQVATNHQSAQAQAQTGWVQNQGILPGMVWQDRDVYLQGPIWAKIPHTDGNFHPSPLMGGFGMKHPPPQILIKNTPVPADPPTAFNKDKLNSFITQYSTGQVSVEIEWELQKENSKRWNPEIQYTSNYYKSNNVEFAVNTEGVYSEPRPIGTRYLTRNL

SEQ ID NO: 12 - protein, 743 aa, synthetic construct
MAADGYLPDWLEDNLSEGIREWWALKPGAPQPKANQQHQDNARGLVLPGYKYLGPGNGLDKGEPVNAADAAALEHDKAYDQQLKAGDNPYLKYNHADAEFQERLKEDTSFGGNLGRAVFQAKKRLLEPLGLVEEAAKTAPGKKRPVEQSPQEPDSSAGIGKSGAQPAKKRLNFGQTGDTESVPDPQPIGEPPAAPSGVGSLTMASGGGAPVADNNEGADGVGSSSGNWHCDSQWLGDRVITTSTRTWALPTYNNHLYKQISNSTSGGSSNDNAYFGYSTPWGYFDFNRFHCHFSPRDWQRLINNNWGFRPKRLNFKLFNIQVKEVTDNNGVKTIANNLTSTVQVFTDSDYQLPYVLGSAHEGCLPPFPADVFMIPQYGYLTLNDGSQAVGRSSFYCLEYFPSQMLRTGNNFQFSYEFENVPFHSSYAHSQSLDRLMNPLIDQYLYYLSRTINGSGQNQQTLKFSVAGPSNMAVQGRNYIPGPSYRQQRVSTTVTQNNNSEFAWPGASSWALNGRNSLMNPGPAMASHKEGEDRFFPLSGSLIFGKQGTGRDNVDADKVMITNEEEIKTTNPVATESYGQVATNHQSAQTLAVPFKAQAQTGWVQNQGILPGMVWQDRDVYLQGPIWAKIPHTDGNFHPSPLMGGFGMKHPPPQILIKNTPVPADPPTAFNKDKLNSFITQYSTGQVSVEIEWELQKENSKRWNPEIQYTSNYYKSNNVEFAVNTEGVYSEPRPIGTRYLTRNL

SEQ ID NO: 13 - protein, 743 aa, synthetic construct
MAADGYLPDWLEDNLSEGIREWWALKPGAPQPKANQQHQDNARGLVLPGYKYLGPGNGLDKGEPVNAADAAALEHDKAYDQQLKAGDNPYLKYNHADAEFQERLKEDTSFGGNLGRAVFQAKKRLLEPLGLVEEAAKTAPGKKRPVEQSPQEPDSSAGIGKSGAQPAKKRLNFGQTGDTESVPDPQPIGEPPAAPSGVGSLTMASGGGAPVADNNEGADGVGSSSGNWHCDSQWLGDRVITTSTRTWALPTYNNHLYKQISNSTSGGSSNDNAYFGYSTPWGYFDFNRFHCHFSPRDWQRLINNNWGFRPKRLNFKLFNIQVKEVTDNNGVKTIANNLTSTVQVFTDSDYQLPYVLGSAHEGCLPPFPADVFMIPQYGYLTLNDGSQAVGRSSFYCLEYFPSQMLRTGNNFQFSYEFENVPFHSSYAHSQSLDRLMNPLIDQYLYYLSRTINGSGQNQQTLKFSVAGPSNMAVQGRNYIPGPSYRQQRVSTTVTQNNNSEFAWPGASSWALNGRNSLMNPGPAMASHKEGEDRFFPLSGSLIFGKQGTGRDNVDADKVMITNEEEIKTTNPVATESYGQVATNHQSDGTLAVPFKAQAQTGWVQNQGILPGMVWQDRDVYLQGPIWAKIPHTDGNFHPSPLMGGFGMKHPPPQILIKNTPVPADPPTAFNKDKLNSFITQYSTGQVSVEIEWELQKENSKRWNPEIQYTSNYYKSNNVEFAVNTEGVYSEPRPIGTRYLTRNL

SEQ ID NO: 14 - protein, 738 aa, unidentified
MAADGYLPDWLEDNLSEGIREWWDLKPGAPKPKANQQKQDDGRGLVLPGYKYLGPFNGLDKGEPVNAADAAALEHDKAYDQQLKAGDNPYLRYNHADAEFQERLQEDTSFGGNLGRAVFQAKKRVLEPLGLVEEGAKTAPGKKRPVEPSPQRSPDSSTGIGKKGQQPAKKRLNFGQTGDSESVPDPQPIGEPPAGPSGLGSGTMAAGGGAPMADNNEGADGVGSSSGNWHCDSTWLGDRVITTSTRTWALPTYNNHLYKQISNGTSGGSTNDNTYFGYSTPWGYFDFNRFHCHFSPRDWQRLINNNWGFRPKRLNFKLFNIQVKEVTQNEGTKTIANNLTSTIQVFTDSEYQLPYVLGSAHQGCLPPFPADVFMIPQYGYLTLNNGSQAVGRSSFYCLEYFPSQMLRTGNNFEFSYQFEDVPFHSSYAHSQSLDRLMNPLIDQYLYYLSRTQSTGGTAGTQQLLFSQAGPNNMSAQAKNWLPGPCYRQQRVSTTLSQNNNSNFAWTGATKYHLNGRDSLVNPGVAMATHKDDEERFFPSSGVLMFGKQGAGKDNVDYSSVMLTSEEEIKTTNPVATEQYGVVADNLQQQNAAPIVGAVNSQGALPGMVWQNRDVYLQGPIWAKIPHTDGNFHPSPLMGGFGLKHPPPQILIKNTPVPADPPTTFSQAKLASFITQYSTGQVSVEIEWELQKENSKRWNPEIQYTSNYYKSTNVDFAVNTDGTYSEPRPIGTRYLTRNL

SEQ ID NO: 15 - DNA, 2217 bp, unidentified
  source 1..2217: mol_type = unassigned DNA
atggctgccgatggttatcttccagattggctcgaggacaacctctctgagggcattcgcgagtggtgggacttgaaacctggagccccgaaacccaaagccaaccagcaaaagcaggacgacggccggggtctggtgcttcctggctacaagtacctcggacccttcaacggactcgacaagggggagcccgtcaacgcggcggacgcagcggccctcgagcacgacaaggcctacgaccagcagctcaaagcgggtgacaatccgtacctgcggtataaccacgccgacgccgagtttcaggagcgtctgcaagaagatacgtcttttgggggcaacctcgggcgagcagtcttccaggccaagaagcgggttctcgaacctctcggtctggttgaggaaggcgctaagacggctcctggaaagaagagaccggtagagccatcaccccagcgttctccagactcctctacgggcatcggcaagaaaggccagcagcccgcgaaaaagagactcaactttgggcagactggcgactcagagtcagtgcccgaccctcaaccaatcggagaaccccccgcaggcccctctggtctgggatctggtacaatggctgcaggcggtggcgctccaatggcagacaataacgaaggcgccgacggagtgggtagttcctcaggaaattggcattgcgattccacatggctgggcgacagagtcatcaccaccagcacccgaacctgggccctccccacctacaacaaccacctctacaagcaaatctccaacgggacttcgggaggaagcaccaacgacaacacctacttcggctacagcaccccctgggggtattttgactttaacagattccactgccacttctcaccacgtgactggcagcgactcatcaacaacaactggggattccggcccaagagactcaacttcaagctcttcaacatccaggtcaaggaggtcacgcagaatgaaggcaccaagaccatcgccaataaccttaccagcacgattcaggtctttacggactcggaataccagctcccgtacgtcctcggctctgcgcaccagggctgcctgcctccgttcccggcggacgtcttcatgattcctcagtacgggtacctgactctgaacaatggcagtcaggccgtgggccgttcctccttctactgcctggagtactttccttctcaaatgctgagaacgggcaacaactttgagttcagctaccagtttgaggacgtgccttttcacagcagctacgcgcacagccaaagcctggaccggctgatgaaccccctcatcgaccagtacctgtactacctgtctcggactcagtccacgggaggtaccgcaggaactcagcagttgctattttctcaggccgggcctaataacatgtcggctcaggccaaaaactggctacccgggccctgctaccggcagcaacgcgtctccacgacactgtcgcaaaataacaacagcaactttgcctggaccggtgccaccaagtatcatctgaatggcagagactctctggtaaatcccggtgtcgctatggcaacccacaaggacgacgaagagcgattttttccgtccagcggagtcttaatgtttgggaaacagggagctggaaaagacaacgtggactatagcagcgttatgctaaccagtgaggaagaaattaaaaccaccaacccagtggccacagaacagtacggcgtggtggccgataacctgcaacagcaaaacgccgctcctattgtaggggccgtcaacagtcaaggagccttacctggcatggtctggcagaaccgggacgtgtacctgcagggtcctatctgggccaagattcctcacacggacggaaactttcatccctcgccgctgatgggaggctttggactgaaacacccgcctcctcagatcctgattaagaatacacctgttcccgcggatcctccaactaccttcagtcaagctaagctggcgtcgttcatcacgcagtacagcaccggacaggtcagcgtggaaattgaatgggagctgcagaaagaaaacagcaaacgctggaacccagagattcaatacacttccaactactacaaatctacaaatgtggactttgctgttaacacagatggcacttattctgagcctcgccccatcggcacccgttacctcacccgtaatctgtaa

SEQ ID NO: 16 - protein, 735 aa, Adeno-associated virus 2 [sequence omitted]

SEQ ID NO: 17 - DNA, 2208 bp, Adeno-associated virus 2
  source 1..2208: mol_type = genomic DNA
atggctgccgatggttatcttccagattggctcgaggacactctctctgaaggaataagacagtggtggaagctcaaacctggcccaccaccaccaaagcccgcagagcggcataaggacgacagcaggggtcttgtgcttcctgggtacaagtacctcggacccttcaacggactcgacaagggagagccggtcaacgaggcagacgccgcggccctcgagcacgacaaagcctacgaccggcagctcgacagcggagacaacccgtacctcaagtacaaccacgccgacgcggagtttcaggagcgccttaaagaagatacgtcttttgggggcaacctcggacgagcagtcttccaggcgaaaaagagggttcttgaacctctgggcctggttgaggaacctgttaagacggctccgggaaaaaagaggccggtagagcactctcctgtggagccagactcctcctcgggaaccggaaaggcgggccagcagcctgcaagaaaaagattgaattttggtcagactggagacgcagactcagtacctgacccccagcctctcggacagccaccagcagccccctctggtctgggaactaatacgatggctacaggcagtggcgcaccaatggcagacaataacgagggcgccgacggagtgggtaattcctcgggaaattggcattgcgattccacatggatgggcgacagagtcatcaccaccagcacccgaacctgggccctgcccacctacaacaaccacctctacaaacaaatttccagccaatcaggagcctcgaacgacaatcactactttggctacagcaccccttgggggtattttgacttcaacagattccactgccacttttcaccacgtgactggcaaagactcatcaacaacaactggggattccgacccaagagactcaacttcaagctctttaacattcaagtcaaagaggtcacgcagaatgacggtacgacgacgattgccaataaccttaccagcacggttcaggtgtttactgactcggagtaccagctcccgtacgtcctcggctcggcgcatcaaggatgcctcccgccgttcccagcagacgtcttcatggtgccacagtatggatacctcaccctgaacaacgggagtcaggcagtaggacgctcttcattttactgcctggagtactttccttctcagatgctgcgtaccggaaacaactttaccttcagctacacttttgaggacgttcctttccacagcagctacgctcacagccagagtctggaccgtctcatgaatcctctcatcgaccagtacctgtattacttgagcagaacaaacactccaagtggaaccaccacgcagtcaaggcttcagttttctcaggccggagcgagtgacattcgggaccagtctaggaactggcttcctggaccctgttaccgccagcagcgagtatcaaagacatctgcggataacaacaacagtgaatactcgtggactggagctaccaagtaccacctcaatggcagagactctctggtgaatccgggcccggccatggcaagccacaaggacgatgaagaaaagttttttcctcagagcggggttctcatctttgggaagcaaggctcagagaaaacaaatgtggacattgaaaaggtcatgattacagacgaagaggaaatcaggacaaccaatcccgtggctacggagcagtatggttctgtatctaccaacctccagagaggcaacagacaagcagctaccgcagatgtcaacacacaaggcgttcttccaggcatggtctggcaggacagagatgtgtaccttcaggggcccatctgggcaaagattccacacacggacggacattttcacccctctcccctcatgggtggattcggacttaaacaccctcctccacagattctcatcaagaacaccccggtacctgcgaatccttcgaccaccttcagtgcggcaaagtttgcttccttcatcacacagtactccacgggacaggtcagcgtggagatcgagtgggagctgcagaaggaaaacagcaaacgctggaatcccgaaattcagtacacttccaactacaacaagtctgttaatgtggactttactgtggacactaatggcgtgtattcagagcctcgccccattggcaccagatacctgactcgtaatctgtaa

SEQ ID NO: 18 - protein, 736 aa, Adeno-associated virus 1
MAADGYLPDWLEDNLSEGIREWWDLKPGAPKPKANQQKQDDGRGLVLPGYKYLGPFNGLDKGEPVNAADAAALEHDKAYDQQLKAGDNPYLRYNHADAEFQERLQEDTSFGGNLGRAVFQAKKRVLEPLGLVEEGAKTAPGKKRPVEQSPQEPDSSSGIGKTGQQPAKKRLNFGQTGDSESVPDPQPLGEPPATPAAVGPTTMASGGGAPMADNNEGADGVGNASGNWHCDSTWLGDRVITTSTRTWALPTYNNHLYKQISSASTGASNDNHYFGYSTPWGYFDFNRFHCHFSPRDWQRLINNNWGFRPKRLNFKLFNIQVKEVTTNDGVTTIANNLTSTVQVFSDSEYQLPYVLGSAHQGCLPPFPADVFMIPQYGYLTLNNGSQAVGRSSFYCLEYFPSQMLRTGNNFTFSYTFEEVPFHSSYAHSQSLDRLMNPLIDQYLYYLNRTQNQSGSAQNKDLLFSRGSPAGMSVQPKNWLPGPCYRQQRVSKTKTDNNNSNFTWTGASKYNLNGRESIINPGTAMASHKDDEDKFFPMSGVMIFGKESAGASNTALDNVMITDEEEIKATNPVATERFGTVAVNFQSSSTDPATGDVHAMGALPGMVWQDRDVYLQGPIWAKIPHTDGHFHPSPLMGGFGLKNPPPQILIKNTPVPANPPAEFSATKFASFITQYSTGQVSVEIEWELQKENSKRWNPEVQYTSNYAKSANVDFTVDNNGLYTEPRPIGTRYLTRPL

SEQ ID NO: 19 - DNA, 2211 bp, Adeno-associated virus 1
  source 1..2211: mol_type = genomic DNA
atggctgccgatggttatcttccagattggctcgaggacaacctctctgagggcattcgcgagtggtgggacttgaaacctggagccccgaagcccaaagccaaccagcaaaagcaggacgacggccggggtctggtgcttcctggctacaagtacctcggacccttcaacggactcgacaagggggagcccgtcaacgcggcggacgcagcggccctcgagcacgacaaggcctacgaccagcagctcaaagcgggtgacaatccgtacctgcggtataaccacgccgacgccgagtttcaggagcgtctgcaagaagatacgtcttttgggggcaacctcgggcgagcagtcttccaggccaagaagcgggttctcgaacctctcggtctggttgaggaaggcgctaagacggctcctggaaagaaacgtccggtagagcagtcgccacaagagccagactcctcctcgggcatcggcaagacaggccagcagcccgctaaaaagagactcaattttggtcagactggcgactcagagtcagtccccgatccacaacctctcggagaacctccagcaacccccgctgctgtgggacctactacaatggcttcaggcggtggcgcaccaatggcagacaataacgaaggcgccgacggagtgggtaatgcctcaggaaattggcattgcgattccacatggctgggcgacagagtcatcaccaccagcacccgcacctgggccttgcccacctacaataaccacctctacaagcaaatctccagtgcttcaacgggggccagcaacgacaaccactacttcggctacagcaccccctgggggtattttgatttcaacagattccactgccacttttcaccacgtgactggcagcgactcatcaacaacaattggggattccggcccaagagactcaacttcaaactcttcaacatccaagtcaaggaggtcacgacgaatgatggcgtcacaaccatcgctaataaccttaccagcacggttcaagtcttctcggactcggagtaccagcttccgtacgtcctcggctctgcgcaccagggctgcctccctccgttcccggcggacgtgttcatgattccgcaatacggctacctgacgctcaacaatggcagccaagccgtgggacgttcatccttttactgcctggaatatttcccttctcagatgctgagaacgggcaacaactttaccttcagctacacctttgaggaagtgcctttccacagcagctacgcgcacagccagagcctggaccggctgatgaatcctctcatcgaccaatacctgtattacctgaacagaactcaaaatcagtccggaagtgcccaaaacaaggacttgctgtttagccgtgggtctccagctggcatgtctgttcagcccaaaaactggctacctggaccctgttatcggcagcagcgcgtttctaaaacaaaaacagacaacaacaacagcaattttacctggactggtgcttcaaaatataacctcaatgggcgtgaatccatcatcaaccctggcactgctatggcctcacacaaagacgacgaagacaagttctttcccatgagcggtgtcatgatttttggaaaagagagcgccggagcttcaaacactgcattggacaatgtcatgattacagacgaagaggaaattaaagccactaaccctgtggccaccgaaagatttgggaccgtggcagtcaatttccagagcagcagcacagaccctgcgaccggagatgtgcatgctatgggagcattacctggcatggtgtggcaagatagagacgtgtacctgcagggtcccatttgggccaaaattcctcacacagatggacactttcacccgtctcctcttatgggcggctttggactcaagaacccgcctcctcagatcctcatcaaaaacacgcctgttcctgcgaatcctccggcggagttttcagctacaaagtttgcttcattcatcacccaatactccacaggacaagtgagtgtggaaattgaatgggagctgcagaaagaaaacagcaagcgctggaatcccgaagtgcagtacacatccaattatgcaaaatctgccaacgttgattttactgtggacaacaatggactttatactgagcctcgccccattggcacccgttaccttacccgtcccctgtaa

SEQ ID NO: 20 - protein, 724 aa, Adeno-associated virus 5
MSFVDHPPDWLEEVGEGLREFLGLEAGPPKPKPNQQHQDQARGLVLPGYNYLGPGNGLDRGEPVNRADEVAREHDISYNEQLEAGDNPYLKYNHADAEFQEKLADDTSFGGNLGKAVFQAKKRVLEPFGLVEEGAKTAPTGKRIDDHFPKRKKARTEEDSKPSTSSDAEAGPSGSQQLQIPAQPASSLGADTMSAGGGGPLGDNNQGADGVGNASGDWHCDSTWMGDRVVTKSTRTWVLPSYNNHQYREIKSGSVDGSNANAYFGYSTPWGYFDFNRFHSHWSPRDWQRLINNYWGFRPRSLRVKIFNIQVKEVTVQDSTTTIANNLTSTVQVFTDDDYQLPYVVGNGTEGCLPAFPPQVFTLPQYGYATLNRDNTENPTERSSFFCLEYFPSKMLRTGNNFEFTYNFEEVPFHSSFAPSQNLFKLANPLVDQYLYRFVSTNNTGGVQFNKNLAGRYANTYKNWFPGPMGRTQGWNLGSGVNRASVSAFATTNRMELEGASYQVPPQPNGMTNNLQGSNTYALENTMIFNSQPANPGTTATYLEGNMLITSESETQPVNRVAYNVGGQMATNNQSSTTAPATGTYNLQEIVPGSVWMERDVYLQGPIWAKIPETGAHFHPSPAMGGFGLKHPPPMMLIKNTPVPGNITSFSDVPVSSFITQYSTGQVTVEMEWELKKENSKRWNPEIQYTNNYNDPQFVDFAPDSTGEYRTTRPIGTRYLTRPL

SEQ ID NO: 21 - DNA, 2175 bp, Adeno-associated virus 5
  source 1..2175: mol_type = genomic DNA
atgtcttttgttgatcaccctccagattggttggaagaagttggtgaaggtcttcgcgagtttttgggccttgaagcgggcccaccgaaaccaaaacccaatcagcagcatcaagatcaagcccgtggtcttgtgctgcctggttataactatctcggacccggaaacggtctcgatcgaggagagcctgtcaacagggcagacgaggtcgcgcgagagcacgacatctcgtacaacgagcagcttgaggcgggagacaacccctacctcaagtacaaccacgcggacgccgagtttcaggagaagctcgccgacgacacatccttcgggggaaacctcggaaaggcagtctttcaggccaagaaaagggttctcgaaccttttggcctggttgaagagggtgctaagacggcccctaccggaaagcggatagacgaccactttccaaaaagaaagaaggcccggaccgaagaggactccaagccttccacctcgtcagacgccgaagctggacccagcggatcccagcagctgcaaatcccagcccaaccagcctcaagtttgggagctgatacaatgtctgcgggaggtggcggcccattgggcgacaataaccaaggtgccgatggagtgggcaatgcctcgggagattggcattgcgattccacgtggatgggggacagagtcgtcaccaagtccacccgaacctgggtgctgcccagctacaacaaccaccagtaccgagagatcaaaagcggctccgtcgacggaagcaacgccaacgcctactttggatacagcaccccctgggggtactttgactttaaccgcttccacagccactggagcccccgagactggcaaagactcatcaacaactactggggcttcagaccccggtccctcagagtcaaaatcttcaacattcaagtcaaagaggtcacggtgcaggactccaccaccaccatcgccaacaacctcacctccaccgtccaagtgtttacggacgacgactaccagctgccctacgtcgtcggcaacgggaccgagggatgcctgccggccttccctccgcaggtctttacgctgccgcagtacggttacgcgacgctgaaccgcgacaacacagaaaatcccaccgagaggagcagcttcttctgcctagagtactttcccagcaagatgctgagaacgggcaacaactttgagtttacctacaactttgaggaggtgcccttccactccagcttcgctcccagtcagaacctcttcaagctggccaacccgctggtggaccagtacttgtaccgcttcgtgagcacaaataacactggcggagtccagttcaacaagaacctggccgggagatacgccaacacctacaaaaactggttcccggggcccatgggccgaacccagggctggaacctgggctccggggtcaaccgcgccagtgtcagcgccttcgccacgaccaataggatggagctcgagggcgcgagttaccaggtgcccccgcagccgaacggcatgaccaacaacctccagggcagcaacacctatgccctggagaacactatgatcttcaacagccagccggcgaacccgggcaccaccgccacgtacctcgagggcaacatgctcatcaccagcgagagcgagacgcagccggtgaaccgcgtggcgtacaacgtcggcgggcagatggccaccaacaaccagagctccaccactgcccccgcgaccggcacgtacaacctccaggaaatcgtgcccggcagcgtgtggatggagagggacgtgtacctccaaggacccatctgggccaagatcccagagacgggggcgcactttcacccctctccggccatgggcggattcggactcaaacacccaccgcccatgatgctcatcaagaacacgcctgtgcccggaaatatcaccagcttctcggacgtgcccgtcagcagcttcatcacccagtacagcaccgggcaggtcaccgtggagatggagtgggagctcaagaaggaaaactccaagaggtggaacccagagatccagtacacaaacaactacaacgacccccagtttgtggactttgccccggacagcaccggggaatacagaaccaccagacctatcggaacccgataccttacccgacccctttaa

SEQ ID NO: 22-39 - skipped (18 entries)

SEQ ID NO: 40 - protein, 19 aa, synthetic construct
PINGAVHLYAQAQTGWVEN

SEQ ID NO: 41 - protein, 19 aa, synthetic construct
PLNGAVHLNAQAQTGWVEN

SEQ ID NO: 42 - protein, 19 aa, synthetic construct
PLNGAVHLYAQAQSGWVEN

SEQ ID NO: 43 - protein, 19 aa, synthetic construct
PLNGAVHLYAQAQTAWVEN

SEQ ID NO: 44 - protein, 19 aa, synthetic construct
PLNGAVHLYAQAQTGCVEN

SEQ ID NO: 45 - protein, 19 aa, synthetic construct
PLNGAVHLYAQAQTGLVEN

SEQ ID NO: 46 - protein, 19 aa, synthetic construct
PVNGAVHLYAQAQTGWVEN

SEQ ID NO: 47 - protein, 19 aa, synthetic construct
SLNGAVHLYAQAQTGWVEN

SEQ ID NO: 48 - protein, 19 aa, synthetic construct
TLNGAVHLYAQAQTGWVEN

SEQ ID NO: 49 - protein, 19 aa, synthetic construct
PHNGAVHLYAQAQTGWVHN

SEQ ID NO: 50 - protein, 19 aa, synthetic construct
PINGAVHLYAQAQTGWVHN

SEQ ID NO: 51 - protein, 19 aa, synthetic construct
PLKGAVHLYAQAQTGWVHN

SEQ ID NO: 52 - protein, 19 aa, synthetic construct
PLNGAAHLYAQAQTGWVHN

SEQ ID NO: 53 - protein, 19 aa, synthetic construct
PLNGADHLYAQAQTGWVHN

SEQ ID NO: 54 - protein, 19 aa, synthetic construct
PLNGAGHLYAQAQTGWVHN

SEQ ID NO: 55 - protein, 19 aa, synthetic construct
PLNGALHLYAQAQTGWVHN

SEQ ID NO: 56 - protein, 19 aa, synthetic construct
PLNGAVDLYAQAQTGWVHN

SEQ ID NO: 57 - protein, 19 aa, synthetic construct
PLNGAVHHYAQAQTGWVHN

SEQ ID NO: 58 - protein, 19 aa, synthetic construct
PLNGAVHIYAQAQTGWVHN

SEQ ID NO: 59 - protein, 19 aa, synthetic construct
PLNGAVHLDAQAQTGWVHN

SEQ ID NO: 60 - protein, 19 aa, synthetic construct
PLNGAVHLNAQAQTGWVHN

SEQ ID NO: 61 - protein, 19 aa, synthetic construct
PLNGAVHLSAQAQTGWVHN

SEQ ID NO: 62 - protein, 19 aa, synthetic construct
PLNGAVHLYAKAQTGWVHN

SEQ ID NO: 63 - protein, 19 aa, synthetic construct
PLNGAVHLYAQAKTGWVHN

SEQ ID NO: 64 - protein, 19 aa, synthetic construct
PLNGAVHLYAQAQAGWVHN

SEQ ID NO: 65 - protein, 19 aa, synthetic construct
PLNGAVHLYAQAQRGWVHN

SEQ ID NO: 66 - protein, 19 aa, synthetic construct
PLNGAVHLYAQAQSGWVHN

SEQ ID NO: 67 - protein, 19 aa, synthetic construct
PLNGAVHLYAQAQTGCVHN

SEQ ID NO: 68 - protein, 19 aa, synthetic construct
PLNGAVHLYAQAQTGLVHN

SEQ ID NO: 69 - protein, 19 aa, synthetic construct
PLNGAVHLYAQAQVSAVHN

SEQ ID NO: 70 - protein, 19 aa, synthetic construct
PLNGAVHLYAQEQTGWVHN

SEQ ID NO: 71 - protein, 19 aa, synthetic construct
PLNGAVHLYAQGQTGWVHN

SEQ ID NO: 72 - protein, 19 aa, synthetic construct
PLNGAVHLYDQAQTGWVHN

SEQ ID NO: 73 - protein, 19 aa, synthetic construct
PLNGAVHLYGQAQTGWVHN

SEQ ID NO: 74 - protein, 19 aa, synthetic construct
PLNGAVHLYSQAQTGWVHN

SEQ ID NO: 75 - protein, 19 aa, synthetic construct
PLNGAVHRYAQAQTGWVHN

SEQ ID NO: 76 - protein, 19 aa, synthetic construct
PLNGAVHVYAQAQTGWVHN

SEQ ID NO: 77 - protein, 19 aa, synthetic construct
PLNGAVNLYAQAQTGWVHN

SEQ ID NO: 78 - protein, 19 aa, synthetic construct
PLNGAVPLYAQAQTGWVHN

SEQ ID NO: 79 - protein, 19 aa, synthetic construct
PLNGAVQLYAQAQTGWVHN

SEQ ID NO: 80 - protein, 19 aa, synthetic construct
PLNGTVHLYAQAQTGWVHN

SEQ ID NO: 81 - protein, 19 aa, synthetic construct
PRNGAVHLYAQAQTGWVHN

SEQ ID NO: 82 - protein, 19 aa, synthetic construct
PVNGAVHLYAQAQTGWVHN

SEQ ID NO: 83 - protein, 19 aa, synthetic construct
SLNGAVHLYAQAQTGWVHN

SEQ ID NO: 84 - protein, 19 aa, synthetic construct
TLNGAVHLYAQAQTGWVHN

SEQ ID NO: 85 - protein, 19 aa, synthetic construct
ALNGAVNLYAQAQTGWVKN

SEQ ID NO: 86 - protein, 19 aa, synthetic construct
KLNGAVHLYAQAQTGWVKN

SEQ ID NO: 87 - protein, 19 aa, synthetic construct
PHNGAVHLYAQAQTGWVKN

SEQ ID NO: 88 - protein, 19 aa, synthetic construct
PINGAVHLYAQAQTGWVKN

SEQ ID NO: 89 - protein, 19 aa, synthetic construct
PLKGAVHLYAQAQTGWVKN

SEQ ID NO: 90 - protein, 19 aa, synthetic construct
PLNAAVHLYAQAQTGWVKN

SEQ ID NO: 91 - protein, 19 aa, synthetic construct
PLNGAAHLYAQAQTGWVKN

SEQ ID NO: 92 - protein, 19 aa, synthetic construct
PLNGADHLYAQAQTGWVKN

SEQ ID NO: 93 - protein, 19 aa, synthetic construct
PLNGAGHLYAQAQTGWVKN

SEQ ID NO: 94 - protein, 19 aa, synthetic construct
PLNGAVDLYAQAQTGWVKN

SEQ ID NO: 95 - protein, 19 aa, synthetic construct
PLNGAVHHYAQAQTGWVKN

SEQ ID NO: 96 - protein, 19 aa, synthetic construct
PLNGAVHIYAQAQTGWVKN

SEQ ID NO: 97 - protein, 19 aa, synthetic construct
PLNGAVHLDAQAQTGWVKN

SEQ ID NO: 98 - protein, 19 aa, synthetic construct
PLNGAVHLNAQAQTGWVKN

SEQ ID NO: 99 - protein, 19 aa, synthetic construct
PLNGAVHLSAQAQTGWVKN

SEQ ID NO: 100 - protein, 19 aa, synthetic construct
PLNGAVHLYAEAQTGWVKN

SEQ ID NO: 101 - protein, 19 aa, synthetic construct
PLNGAVHLYAHAQTGWVKN

SEQ ID NO: 102 - protein, 19 aa, synthetic construct
PLNGAVHLYALAQTGWVKN

SEQ ID NO: 103 - protein, 19 aa, synthetic construct
PLNGAVHLYAPAQTGWVKN

SEQ ID NO: 104 - protein, 19 aa, synthetic construct
PLNGAVHLYAQAETGWVKN

SEQ ID NO: 105 - protein, 19 aa, synthetic construct
PLNGAVHLYAQAQKGWVKN

SEQ ID NO: 106 - protein, 19 aa, synthetic construct
PLNGAVHLYAQAQPGWVKN

SEQ ID NO: 107 - protein, 19 aa, synthetic construct
PLNGAVHLYAQAQSGWVKN

SEQ ID NO: 108 - protein, 19 aa, synthetic construct
PLNGAVHLYAQAQSSLVKN

SEQ ID NO: 109 - DNA, 1406 bp, synthetic construct
  source 1..1406: mol_type = other DNA
ctgcgcgctcgctcgctcactgaggccgcccgggcaaagcccgggcgtcgggcgacctttggtcgcccggcctcagtgagcgagcgagcgcgcagagagggagtgtagccatgctctaggaagatcaattcaattcacgcgtccatggcttagaaggcaagaatcctggctgtggaaagatacctaaaggatcaacagctcctggggatttggggttgctctggaaaactcatttgcaccactgctgtgccttggaatgctagttggagtaataaatctctggaacagatttggaatcacacgacctggatggagtgggacagagaaattaacaattacacaagcttaatacactccttaattgaagaatcgcaaaaccagcaagaaaagaatgaacaagaattattggaattagataaatgggcaagtttgtggaattggtttaacataacaaattggctgtggtatataaaattattcataatgatagtaggaggcttggtaggtttaagaatagtttttgctgtactttctatagtgaatagagttaggcagggatattcaccattatcgtttcagacccacctcccaaccccgaggggacccgacaggcccgaaggaatagaagaagaaggtggagagagagacagagacagatccattcgattagtgaacggatctcgacggtatcgatcacgagactagcctcgagcggccgcaattcgaacgctgacgtcatcaacccgctccaaggaatcgcgggcccagtgtcactaggcgggaacacccagcgcgcgtgcgccctggcaggaagatggctgtgagggacagggagtggcgccctgcaatatttgcatgtcgctatgtgttctgggaaatcaccataaacgtgaaatgtctttggatttgggaatcttataagttctgtatgagaccacaccggtaccgagctctcccgcagaacaccatgcgctccacggaagcaggtcctcactttaatgctgtggccactgagaagtattaaagtgaggacctgcttctgaggagcgccttgacagcagccatgggagggcctcgaggacggggtgaactacgcctgaggatccgatctttttccctctgccaaaaattatggggacatcatgaagccccttgagcatctgacttctggctaataaaggaaatttattttcattgcaatagtgtgttggaattttttgtgtctctcactcggcctaggtagataagtagcatggcgggttaatcattaactacaaggaacccctagtgatggagttggccactccctctctgcgcgctcgctcgctcactgaggccgggcgaccaaaggtcgcccgacgcccgggctttgcccgggcggcctcagtgagcgagcgagcgcgcag

SEQ ID NO: 110 - DNA, 981 bp, Homo sapiens
  source 1..981: mol_type = genomic DNA
gtttggggccagagtgggcgaggcgcggaggtctggcctataaagtagtcgcggagacggggtgctggtttgcgtcgtagtctcctgcagcgtctggggtttccgttgcagtcctcggaaccaggacctcggcgtggcctagcgagttatggcgacgaaggccgtgtgcgtgctgaagggcgacggcccagtgcagggcatcatcaatttcgagcagaaggaaagtaatggaccagtgaaggtgtggggaagcattaaaggactgactgaaggcctgcatggattccatgttcatgagtttggagataatacagcaggctgtaccagtgcaggtcctcactttaatcctctatccagaaaacacggtgggccaaaggatgaagagaggcatgttggagacttgggcaatgtgactgctgacaaagatggtgtggccgatgtgtctattgaagattctgtgatctcactctcaggagaccattgcatcattggccgcacactggtggtccatgaaaaagcagatgacttgggcaaaggtggaaatgaagaaagtacaaagacaggaaacgctggaagtcgtttggcttgtggtgtaattgggatcgcccaataaacattcccttggatgtagtctgaggccccttaactcatctgttatcctgctagctgtagaaatgtatcctgataaacattaaacactgtaatcttaaaagtgtaattgtgtgactttttcagagttgctttaaagtacctgtagtgagaaactgatttatgatcacttggaagatttgtatagttttataaaactcagttaaaatgtctgtttcaatgacctgtattttgccagacttaaatcacagatgggtattaaacttgtcagaatttctttgtcattcaagcctgtgaataaaaaccctgtatggcacttattatgaggctattaaaagaatccaaattcaaactaaaaaaaaaaaaaaaaaa

SEQ ID NO: 111 - DNA, 465 bp, Macaca fascicularis
  source 1..465: mol_type = genomic DNA
atggcgatgaaggccgtgtgcgtgttgaagggcgacagcccagtgcagggcaccatcaatttcgagcagaaggaaagtaatggaccagtgaaggtgtggggaagcattacaggattgactgaaggcctgcatggattccatgttcatcagtttggagataatacacaaggctgtaccagtgcaggtcctcactttaatcctctatccagacaacacggtgggccaaaggatgaagagaggcatgttggagacctgggcaatgtgactgctggcaaagatggtgtggccaaggtgtctttcgaagattctgtgatctcgctctcaggagaccattccatcattggccgcacattggtggtccatgaaaaagcagatgacttgggcaaaggtggaaatgaagaaagtaaaaagacaggaaacgctggaggtcgtctggcttgtggtgtaattgggatcgcccaataa

SEQ ID NO: 112 - DNA, 658 bp, Macaca mulatta
  source 1..658: mol_type = genomic DNA
cgtcggcgtgtactgcggcctctcccgctgcttctggtaccctcccagcccggaccggagcgcgcccccgcgagtcatggcgacgaaggccgtgtgtgtgctgaagggcgacggcccggtgcagggcaccatctacttcgagctgaagggagagaagacagtgttagtaacgggaaccattaaaggactggctgaaggtgatcatggattccatgtccatcagtttggagataatacacaaggctgtaccagtgcaggtcctcacttcaatcctgaatccaaaaaacatggtgggccaaaggatcaagagaggcacgttggagacctgggcaatgtgactgctggcaaagatggtgtggccactgtgtacatcgaagattctgtgatcgccctctcgggagaccattccatcattggccgcacaatggtggtccatgaaaaaccagatgacttgggcagaggtggaaatgaagaaagtacaaagacgggaaatgctggaagtcgtttggcctgtggtgtaattgggatcacccagtaaacattccctcatgccatggtctgaatgccagtaactcatctgttatcttgctagttgtagttgtagaaatttaacttgataaacattaaacactgtaaccttaaaaaaaaaaaaaaaaaa

SEQ ID NO: 113 - protein, 19 aa, Sus scrofa
PLNGAVHLYAQAQTGCVKN

SEQ ID NO: 114 - protein, 19 aa, synthetic construct
PLNGAVHLYAQAQTGLVKN

SEQ ID NO: 115 - protein, 19 aa, synthetic construct
PLNGAVHLYAQAQTSWVKN

SEQ ID NO: 116 - protein, 19 aa, synthetic construct
PLNGAVHLYAQEQTGWVKN

SEQ ID NO: 117 - protein, 19 aa, synthetic construct
PLNGAVHLYAQSQTGWVKN

SEQ ID NO: 118 - protein, 19 aa, synthetic construct
PLNGAVHLYDQAQTGWVKN

SEQ ID NO: 119 - protein, 19 aa, synthetic construct
PLNGAVHLYEQAQTGWVKN

SEQ ID NO: 120 - protein, 19 aa, synthetic construct
PLNGAVHLYGQAQTGWVKN

SEQ ID NO: 121 - protein, 19 aa, synthetic construct
PLNGAVHLYSQAQTGLVKN

SEQ ID NO: 122 - protein, 19 aa, synthetic construct
PLNGAVHLYSQAQTGWVKN

SEQ ID NO: 123 - protein, 19 aa, synthetic construct
PLNGAVHLYTQAQTGWVKN

SEQ ID NO: 124 - protein, 19 aa, synthetic construct
PLNGAVHPYAQAQTGWVKN

SEQ ID NO: 125 - DNA, 1412 bp, synthetic construct
  source 1..1412: mol_type = other DNA
ctgcgcgctcgctcgctcactgaggccgcccgggcaaagcccgggcgtcgggcgacctttggtcgcccggcctcagtgagcgagcgagcgcgcagagagggagtgtagccatgctctaggaagatcaattcaattcacgcgtatagtcttctgcacagggcattctttttgcttcaggatgtttacaacatttgctgcccacttttcctaggtttcttgagacctctacaagagttggagttgacacttggggtactttcttggtgtaacgaactaatagcctgaaaaaaagaagtcatgtgttttcagcaaggcaagaaactgtctaacatagtagataaaacagagaacacttggccggaatcaactaagatgttgctatgttccattcatcatattatctccatctgcagagtagtgggttagtggagggtagaaaacattctcctgaacaactagttaaacttggctttgagttccacctgtaccacttgcataatcttgggaaagtgagttgcctaattcagtgacattaataaatttattaatttcttctttcaataaaacctggagagagcttcatatgtatcagcatatgctaaacttgaaagatacaagtagaaaatggaaggaaatatatctgactcaatagggatagttcaagggttaaattaaaagtagtaaagtattataattaatctgacatggtaccctctagcggccgcaattcgaacgctgacgtcatcaacccgctccaaggaatcgcgggcccagtgtcactaggcgggaacacccagcgcgcgtgcgccctggcaggaagatggctgtgagggacagggagtggcgccctgcaatatttgcatgtcgctatgtgttctgggaaatcaccataaacgtgaaatgtctttggatttgggaatcttataagttctgtatgagaccacaccggtaccgagctctcccgcagaacaccatgcgctccacggaagcaggtcctcactttaatgctgtggccactgagaagtattaaagtgaggacctgcttctgaggagcgccttgacagcagccatgggagggcctcgaggacggggtgaactacgcctgaggatccgatctttttccctctgccaaaaattatggggacatcatgaagccccttgagcatctgacttctggctaataaaggaaatttattttcattgcaatagtgtgttggaattttttgtgtctctcactcggcctaggtagataagtagcatggcgggttaatcattaactacaaggaacccctagtgatggagttggccactccctctctgcgcgctcgctcgctcactgaggccgggcgaccaaaggtcgcccgacgcccgggctttgcccgggcggcctcagtgagcgagcgagcgcgcag

SEQ ID NO: 126 - DNA, 105 bp, synthetic construct
  source 1..105: mol_type = other DNA
ctgcgcgctcgctcgctcactgaggccgcccgggcaaagcccgggcgtcgggcgacctttggtcgcccggcctcagtgagcgagcgagcgcgcagagagggagtg

SEQ ID NO: 127 - DNA, 570 bp, synthetic construct
  source 1..570: mol_type = other DNA
atagtcttctgcacagggcattctttttgcttcaggatgtttacaacatttgctgcccacttttcctaggtttcttgagacctctacaagagttggagttgacacttggggtactttcttggtgtaacgaactaatagcctgaaaaaaagaagtcatgtgttttcagcaaggcaagaaactgtctaacatagtagataaaacagagaacacttggccggaatcaactaagatgttgctatgttccattcatcatattatctccatctgcagagtagtgggttagtggagggtagaaaacattctcctgaacaactagttaaacttggctttgagttccacctgtaccacttgcataatcttgggaaagtgagttgcctaattcagtgacattaataaatttattaatttcttctttcaataaaacctggagagagcttcatatgtatcagcatatgctaaacttgaaagatacaagtagaaaatggaaggaaatatatctgactcaatagggatagttcaagggttaaattaaaagtagtaaagtattataattaatctgacatggtacc

SEQ ID NO: 128 - DNA, 219 bp, synthetic construct
  source 1..219: mol_type = other DNA
aattcgaacgctgacgtcatcaacccgctccaaggaatcgcgggcccagtgtcactaggcgggaacacccagcgcgcgtgcgccctggcaggaagatggctgtgagggacagggagtggcgccctgcaatatttgcatgtcgctatgtgttctgggaaatcaccataaacgtgaaatgtctttggatttgggaatcttataagttctgtatgagaccac

SEQ ID NO: 129 - DNA, 127 bp, Oryctolagus sp.
  source 1..127: mol_type = genomic DNA
gatctttttccctctgccaaaaattatggggacatcatgaagccccttgagcatctgacttctggctaataaaggaaatttattttcattgcaatagtgtgttggaattttttgtgtctctcactcg

SEQ ID NO: 130 - DNA, 130 bp, synthetic construct
  source 1..130: mol_type = other DNA
aggaacccctagtgatggagttggccactccctctctgcgcgctcgctcgctcactgaggccgggcgaccaaaggtcgcccgacgcccgggctttgcccgggcggcctcagtgagcgagcgagcgcgcag

SEQ ID NO: 131 - protein, 19 aa, synthetic construct
PLNGAVNLYDQAQTGWVKN

SEQ ID NO: 132 - protein, 19 aa, synthetic construct
PLNGAVPLYAQAQTGWVKN

SEQ ID NO: 133 - protein, 19 aa, synthetic construct
PLNGAVQLYAQAQTGWVKN

SEQ ID NO: 134 - protein, 19 aa, synthetic construct
PLNGAVRSTAQAQTGWVKN

SEQ ID NO: 135 - protein, 19 aa, synthetic construct
PLNGAVSLRAQAQTGWVKN

SEQ ID NO: 136 - protein, 19 aa, synthetic construct
PLNGAVSSRAQAQTGWVKN

SEQ ID NO: 137 - DNA, 2211 bp, synthetic construct
  source 1..2211: mol_type = other DNA
atggctgccgatggttatcttccagattggctcgaggacaaccttagtgaaggaattcgcgagtggtgggctttgaaacctggagcccctcaacccaaggcaaatcaacaacatcaagacaacgctcgaggtcttgtgcttccgggttacaaataccttggacccggcaacggactcgacaagggggagccggtcaacgcagcagacgcggcggccctcgagcacgacaaggcctacgaccagcagctcaaggccggagacaacccgtacctcaagtacaaccacgccgacgccgagttccaggagcggctcaaagaagatacgtcttttgggggcaacctcgggcgagcagtcttccaggccaaaaagaggcttcttgaacctcttggtctggttgaggaagcggctaagacggctcctggaaagaagaggcctgtagagcagtctcctcaggaaccggactcctccgcgggtattggcaaatcgggtgcacagcccgctaaaaagagactcaatttcggtcagactggcgacacagagtcagtcccagaccctcaaccaatcggagaacctcccgcagccccctcaggtgtgggatctcttacaatggcttcaggtggtggcgcaccagtggcagacaataacgaaggtgccgatggagtgggtagttcctcgggaaattggcattgcgattcccaatggctgggggacagagtcatcaccaccagcacccgaacctgggccctgcccacctacaacaatcacctctacaagcaaatctccaacagcacatctggaggatcttcaaatgacaacgcctacttcggctacagcaccccctgggggtattttgacttcaacagattccactgccacttctcaccacgtgactggcagcgactcatcaacaacaactggggattccggcctaagcgactcaacttcaagctcttcaacattcaggtcaaagaggttacggacaacaatggagtcaagaccatcgccaataaccttaccagcacggtccaggtcttcacggactcagactatcagctcccgtacgtgctcgggtcggctcacgagggctgcctcccgccgttcccagcggacgttttcatgattcctcagtacgggtatctgacgcttaatgatggaagccaggccgtgggtcgttcgtccttttactgcctggaatatttcccgtcgcaaatgctaagaacgggtaacaacttccagttcagctacgagtttgagaacgtacctttccatagcagctacgctcacagccaaagcctggaccgactaatgaatccactcatcgaccaatacttgtactatctctcaaagactattaacggttctggacagaatcaacaaacgctaaaattcagtgtggccggacccagcaacatggctgtccagggaagaaactacatacctggacccagctaccgacaacaacgtgtctcaaccactgtgactcaaaacaacaacagcgaatttgcttggcctggagcttcttcttgggctctcaatggacgtaatagcttgatgaatcctggacctgctatggccagccacaaagaaggagaggaccgtttctttcctttgtctggatctttaatttttggcaaacaaggaactggaagagacaacgtggatgcggacaaagtcatgataaccaacgaagaagaaattaaaactactaacccggtagcaacggagtcctatggacaagtggccacaaaccaccagagtgcccaagcacaggcgcagaccggctgggttcaaaaccaaggaatacttccgggtatggtttggcaggacagagatgtgtacctgcaaggacccatttgggccaaaattcctcacacggacggcaactttcacccttctccgctgatgggagggtttggaatgaagcacccgcctcctcagatcctcatcaaaaacacacctgtacctgcggatcctccaacggccttcaacaaggacaagctgaactctttcatcacccagtattctactggccaagtcagcgtggagatcgagtgggagctgcagaaggaaaacagcaagcgctggaacccggagatccagtacacttccaactattacaagtctaataatgttgaatttgctgttaatactgaaggtgtatatagtgaaccccgccccattggcaccagatacctgactcgtaatctgtaa

SEQ ID NO: 138 - protein, 736 aa, synthetic construct
MAADGYLPDWLEDNLSEGIREWWALKPGAPQPKANQQHQDNARGLVLPGYKYLGPGNGLDKGEPVNAADAAALEHDKAYDQQLKAGDNPYLKYNHADAEFQERLKEDTSFGGNLGRAVFQAKKRLLEPLGLVEEAAKTAPGKKRPVEQSPQEPDSSAGIGKSGAQPAKKRLNFGQTGDTESVPDPQPIGEPPAAPSGVGSLTMASGGGAPVADNNEGADGVGSSSGNWHCDSQWLGDRVITTSTRTWALPTYNNHLYKQISNSTSGGSSNDNAYFGYSTPWGYFDFNRFHCHFSPRDWQRLINNNWGFRPKRLNFKLFNIQVKEVTDNNGVKTIANNLTSTVQVFTDSDYQLPYVLGSAHEGCLPPFPADVFMIPQYGYLTLNDGSQAVGRSSFYCLEYFPSQMLRTGNNFQFSYEFENVPFHSSYAHSQSLDRLMNPLIDQYLYYLSKTINGSGQNQQTLKFSVAGPSNMAVQGRNYIPGPSYRQQRVSTTVTQNNNSEFAWPGASSWALNGRNSLMNPGPAMASHKEGEDRFFPLSGSLIFGKQGTGRDNVDADKVMITNEEEIKTTNPVATESYGQVATNHQSAQAQAQTGWVQNQGILPGMVWQDRDVYLQGPIWAKIPHTDGNFHPSPLMGGFGMKHPPPQILIKNTPVPADPPTAFNKDKLNSFITQYSTGQVSVEIEWELQKENSKRWNPEIQYTSNYYKSNNVEFAVNTEGVYSEPRPIGTRYLTRNL

SEQ ID NO: 139 - protein, 19 aa, synthetic construct
QLNGAVHLYAQAQLSPVQN

SEQ ID NO: 140 - protein, 19 aa, synthetic construct
PLDGAVHLYAQPQTGWVQN

SEQ ID NO: 141 - protein, 19 aa, synthetic construct
QLNGAVHLYAQAQTMSVQN

SEQ ID NO: 142 - protein, 19 aa, synthetic construct
PLDSSVHLYAQAQTGWVQN

SEQ ID NO: 143 - protein, 19 aa, synthetic construct
PLNGAVHLYAQAQTTKVQN

SEQ ID NO: 144 - protein, 19 aa, synthetic construct
PLDGAVHLYAQAQTGSVQN

SEQ ID NO: 145 - protein, 19 aa, synthetic construct
ALNGAVHLYAQAQTTSVQN

SEQ ID NO: 146 - protein, 19 aa, synthetic construct
PLNGSVHLYAQAQTMSVQN

SEQ ID NO: 147 - protein, 19 aa, synthetic construct
QLNGAVHLYAQAQTSPVQN

SEQ ID NO: 148 - protein, 19 aa, synthetic construct
PLNGAVHLYAQAQTMKVQN

SEQ ID NO: 149 - protein, 19 aa, synthetic construct
PLNGAVHLYAQAQVAQVQN

SEQ ID NO: 150 - protein, 19 aa, synthetic construct
PLDGAVHLYAQAQTGGVQN

SEQ ID NO: 151 - protein, 19 aa, synthetic construct
PLNGAVHLYAQAQTAWDQN

SEQ ID NO: 152 - protein, 19 aa, synthetic construct
PLNGSVHLYAQAQTGWDQN

SEQ ID NO: 153 - protein, 19 aa, synthetic construct
PLNGAVHLYAQAQTGSVQH

SEQ ID NO: 154 - protein, 19 aa, synthetic construct
PLNGAVHLYAQAQVKQVQN

SEQ ID NO: 155 - protein, 19 aa, synthetic construct
PLNGAVHLYAQAQSAPVQN

SEQ ID NO: 156 - protein, 19 aa, synthetic construct
PLNGAVHLYAQAQLSKVQN

SEQ ID NO: 157 - protein, 19 aa, synthetic construct
PLNGAVHLYAQAQLAPVQN

SEQ ID NO: 158 - protein, 19 aa, synthetic construct
PLNGAVHLYAQAQLAQVQN

SEQ ID NO: 159 - protein, 19 aa, synthetic construct
QLNGAVHLYAQAQVASVQN

SEQ ID NO: 160 - protein, 19 aa, synthetic construct
PLNGAVHLYAQAQTAKVQN

SEQ ID NO: 161 - protein, 19 aa, synthetic construct
PLNGAVHLYAQAQSAKVQN

SEQ ID NO: 162 - protein, 19 aa, synthetic construct
PLNGAVHLYAQAQTGCFQN

SEQ ID NO: 163 - protein, 19 aa, synthetic construct
PLNGAVHLYAQAQTQKVQN

SEQ ID NO: 164 - protein, 19 aa, synthetic construct
PLNGSVHLYAQAQTTSVQN

SEQ ID NO: 165 - protein, 19 aa, synthetic construct
PLNGGVHLYAQAQTGRVQN

SEQ ID NO: 166 - protein, 19 aa, synthetic construct
PLNGAVHLYAQAQTVAVQN

SEQ ID NO: 167 - protein, 19 aa, synthetic construct
ALNGAVHLYAQAQSSPVQN

SEQ ID NO: 168 - protein, 19 aa, synthetic construct
PLNGAVHLYAQAQLSPVQN

SEQ ID NO: 169 - protein, 19 aa, synthetic construct
QLNGAVHLYAQAQTTSVQN

SEQ ID NO: 170 - protein, 19 aa, synthetic construct
PLNGAVHLYAQAQTTQVQN

SEQ ID NO: 171 - protein, 19 aa, synthetic construct
PLNGAVHLYAQAQTAQVQN

SEQ ID NO: 172 - protein, 19 aa, synthetic construct
QLNGAVHLYAQAQTVAVQN

SEQ ID NO: 173 - protein, 19 aa, synthetic construct
PLNGAVHLYAQAQRIAVQN

SEQ ID NO: 174 - protein, 19 aa, synthetic construct
PLNGAVHLYAQAQRASVQN

SEQ ID NO: 175 - protein, 19 aa, synthetic construct
PLNGAVHLYAQAQTTPVQN

SEQ ID NO: 176 - protein, 19 aa, synthetic construct
QLNGAVHLYAQAQLASVQN

SEQ ID NO: 177 - protein, 19 aa, synthetic construct
PLNGAVHLYAQAQLTPVQN

SEQ ID NO: 178 - protein, 19 aa, synthetic construct
PLNGAVHLYAQAQSTPVQN

SEQ ID NO: 179 - protein, 19 aa, synthetic construct
PLNGAVHLYAQAQTSPVQN

SEQ ID NO: 180 - protein, 19 aa, synthetic construct
QLNGAVHLYAQAQVSQVQN

SEQ ID NO: 181 - protein, 19 aa, synthetic construct
PLNGAVHLYAQAQTMQVQN

SEQ ID NO: 182 - protein, 19 aa, synthetic construct
PLNGAVHLYAQAQTSKVQN

SEQ ID NO: 183 - protein, 19 aa, synthetic construct
SLNGAVHLYAQAQVSPVQN

SEQ ID NO: 184 - protein, 19 aa, synthetic construct
PLNGAVHLYAQAQVSQVQN

SEQ ID NO: 185 - protein, 19 aa, synthetic construct
PLNGAVHLYAQAQVSPVQN

SEQ ID NO: 186 - protein, 19 aa, synthetic construct
PLNGAVHLYAQAQTVQVQN

SEQ ID NO: 187 - protein, 19 aa, synthetic construct
PLNGAVHLYAQAQVTAVQN

SEQ ID NO: 188 - protein, 19 aa, synthetic construct
PLNGAVHLYAQAQRQPVQN

SEQ ID NO: 189 - protein, 19 aa, synthetic construct
PLNGNVHLYAQAQTGGVQN

SEQ ID NO: 190 - protein, 19 aa, synthetic construct
PLDGAVHLYAQAQTAWVQN

SEQ ID NO: 191 - protein, 19 aa, synthetic construct
PLNGAVHLYAQAQISGVQN

SEQ ID NO: 192 - protein, 19 aa, synthetic construct
PLNGAVHLYAQAQVRPVQN

SEQ ID NO: 193 - protein, 19 aa, synthetic construct
PLNGAVHLYAQAQLGPVQN

SEQ ID NO: 194 - protein, 19 aa, synthetic construct
PLNGAVHLYAQAQTNQVQN

SEQ ID NO: 195 - protein, 19 aa, synthetic construct
PLNGAVHLYAQAQVQQVQN

SEQ ID NO: 196 - protein, 19 aa, synthetic construct
PLNGAVHLYAQAQVANVQN

SEQ ID NO: 197 - protein, 19 aa, synthetic construct
PLNGAVHLYAQAQAAPVQN

SEQ ID NO: 198 - protein, 19 aa, synthetic construct
QLNGAVHLYAQAQVAQVQN

SEQ ID NO: 199 - protein, 19 aa, synthetic construct
PLNGAVHLYAQAQRSTVQN

SEQ ID NO: 200 - protein, 19 aa, synthetic construct
PLNGAVHLYAQAQTMAVQN

SEQ ID NO: 201 - protein, 19 aa, synthetic construct
PLNGAVHLYAQAQIQPVQN

SEQ ID NO: 202 - protein, 19 aa, synthetic construct
PLNGAVHLYAQAQIASVQN

SEQ ID NO: 203 - protein, 19 aa, synthetic construct
PLNGAVHLYAQAQTVSVQN

SEQ ID NO: 204 - protein, 19 aa, synthetic construct
PLNGAVHLYAQAQRGSVQN

SEQ ID NO: 205 - protein, 19 aa, synthetic construct
PLNGAVHLYAQAQNSPVQN

SEQ ID NO: 206 - protein, 19 aa, synthetic construct
PLNGAVHLYAQAQLQPVQN

SEQ ID NO: 207 - protein, 19 aa, synthetic construct
PLNGAVHLYAQAQVTGVQN

SEQ ID NO: 208 - protein, 19 aa, synthetic construct
PLNGAVHLYAQAQVMQVQN

SEQ ID NO: 209 - protein, 19 aa, synthetic construct
PLNGAVHLYAQAQSMAVQN

SEQ ID NO: 210 - protein, 19 aa, synthetic construct
PLNGAVHLYAQAQVGKVQN

SEQ ID NO: 211 - protein, 19 aa, synthetic construct
ALNGAVHLYAQAQSAPVQN

SEQ ID NO: 212 - protein, 19 aa, synthetic construct
PLNGAVHLYAQAQIQSVQN

SEQ ID NO: 213 - protein, 19 aa, synthetic construct
PLNGAVHLYAQAQCSPVQN

SEQ ID NO: 214 - protein, 19 aa, synthetic construct
PLNGAVHLYAQAQLQRVQN

SEQ ID NO: 215 - protein, 19 aa, synthetic construct
PLNGAVHLYAQAQTAWVQH

SEQ ID NO: 216 - protein, 19 aa, synthetic construct
PLDGAVHLYAQAQTGWDQN

SEQ ID NO: 217 - protein, 19 aa, synthetic construct
PLNGAVHLYAQAQTPPVQN

SEQ ID NO: 218 - protein, 19 aa, synthetic construct
PLNGAVHLYAQAQVTKVQN

SEQ ID NO: 219 - protein, 19 aa, synthetic construct
PLNGAVHLYAQAQSSPVQN

SEQ ID NO: 220 - protein, 19 aa, synthetic construct
PLNGAVHLYAQAQAGPVQN

SEQ ID NO: 221 - protein, 19 aa, synthetic construct
PLNGAVHLYAQAQLARVQN

SEQ ID NO: 222 - protein, 19 aa, synthetic construct
PLNGAVHLYAQAQTTTVQN

SEQ ID NO: 223 - protein, 19 aa, synthetic construct
PLNGAVHLYAQAQTGGFQN

SEQ ID NO: 224 - protein, 19 aa, synthetic construct
PLNGAVHLYAQAQTLQVQN

SEQ ID NO: 225 - protein, 19 aa, synthetic construct
PLNGAVHLYAQAQTMSVQN

SEQ ID NO: 226 - protein, 19 aa, synthetic construct
QLNGAVHLYAQAQLQPVQN

SEQ ID NO: 227 - protein, 19 aa, synthetic construct
PLNGAVHLYAQAQVAKVQN

SEQ ID NO: 228 - protein, 19 aa, synthetic construct
PLNGAVHLYAQAQRAAVQN

SEQ ID NO: 229 - protein, 19 aa, synthetic construct
PLNGAVHLYAQAQTVGVQN

SEQ ID NO: 230 - protein, 19 aa, synthetic construct
PLNGAVHLYAQAQLNPVQN

SEQ ID NO: 231 - protein, 19 aa, synthetic construct
PLNGAVHLYAQAQLSQVQN

SEQ ID NO: 232 - protein, 19 aa, synthetic construct
PLNGTVHLYAQAQTGSVQN

SEQ ID NO: 233 - protein, 19 aa, synthetic construct
PLNGAVHLYAQAQTKPVQN

SEQ ID NO: 234 - protein, 19 aa, synthetic construct
PLNGAVHLYAQAQTNAVQN

SEQ ID NO: 235 - protein, 19 aa, synthetic construct
ALDGAVHLYAQAQTGWVQN

SEQ ID NO: 236 - protein, 19 aa, synthetic construct
PLNGAVHLYAQAQLATVQN

SEQ ID NO: 237 - protein, 19 aa, synthetic construct
PLNGAVHLYAQAQVTPVQN

SEQ ID NO: 238 - protein, 19 aa, synthetic construct
PLNGAVHLYAQAQVQAVQN

SEQ ID NO: 239 - protein, 19 aa, synthetic construct
PLNGAVHLYAQAQTTSVQN

SEQ ID NO: 240 - protein, 19 aa, synthetic construct
PLNGAVHLYAQAQCTPVQN

SEQ ID NO: 241 - protein, 19 aa, synthetic construct
ALNGAVHLYAQAQTGRVQN

SEQ ID NO: 242 - protein, 19 aa, synthetic construct
PLNGSVHLYAQAQTGWVQD

SEQ ID NO: 243 - protein, 19 aa, synthetic construct
PLNGAVHLYAQAQTAGVQN

SEQ ID NO: 244 - protein, 19 aa, synthetic construct
PLNGAVHLYAQAQTSQVQN

SEQ ID NO: 245 - protein, 19 aa, synthetic construct
PLNGAVHLYAQAQTMNVQN

SEQ ID NO: 246 - protein, 19 aa, synthetic construct
PLNGAVHLYAQAQTSTVQN

SEQ ID NO: 247 - protein, 19 aa, synthetic construct
PLNGAVHLYAQAQVKPVQN

SEQ ID NO: 248 - protein, 19 aa, synthetic construct
PLNGAVHLYAQAQASPVQN

SEQ ID NO: 249 - protein, 19 aa, synthetic construct
PLNGAVHLYAQAQVAAVQN

SEQ ID NO: 250 - protein, 19 aa, synthetic construct
PLNGAVHLYAQAQLKSVQN

SEQ ID NO: 251 - protein, 19 aa, synthetic construct
PLNGAVHLYAQAQIAAVQN

SEQ ID NO: 252 - protein, 19 aa, synthetic construct
PLNGAVHLYAQAQTAAVQN

SEQ ID NO: 253 - protein, 19 aa, synthetic construct
PLNGAVHLYAQAQTKAVQN

SEQ ID NO: 254 - protein, 19 aa, synthetic construct
PLNGAVHLYAQAQTGSVQS

SEQ ID NO: 255 - protein, 19 aa, synthetic construct
PLNGAVHLYAQAQVSNVQN

SEQ ID NO: 256 - protein, 19 aa, synthetic construct
PLNGAVHLYAQAQTAPVQN

SEQ ID NO: 257 - protein, 19 aa, synthetic construct
PLNGAVHLYAQAQLMPVQN

SEQ ID NO: 258 - protein, 19 aa, synthetic construct
PLNGAVHLYAQAQLHPVQN

SEQ ID NO: 259 - protein, 19 aa, synthetic construct
PLNGAVHLYAQAQRAQVQN

SEQ ID NO: 260 - protein, 19 aa, synthetic construct
PLNGAVHLYAQAQLTNVQN

SEQ ID NO: 261 - protein, 19 aa, synthetic construct
PLNGAVHLYAQAQRTTVQN

SEQ ID NO: 262 - protein, 19 aa, synthetic construct
PLNGAVHLYAQAQTSVVQN

SEQ ID NO: 263 - protein, 19 aa, synthetic construct
SLNGAVHLYAQAQTMSVQN

SEQ ID NO: 264 - protein, 19 aa, synthetic construct
ALNGAVHLYAQAQTLAVQN

SEQ ID NO: 265 - protein, 19 aa, synthetic construct
PLNGAVHLYAQAQRMSVQN

SEQ ID NO: 266 - protein, 19 aa, synthetic construct
ALNGAVHLYAQAQLTPVQN

SEQ ID NO: 267 - protein, 19 aa, synthetic construct
PLNGAVHLYAQAQVGNVQN

SEQ ID NO: 268 - protein, 19 aa, synthetic construct
PLNGAVHLYAQAQLMQVQN

SEQ ID NO: 269 - protein, 19 aa, synthetic construct
PLNGSVHLYAQAQTAQVQN

SEQ ID NO: 270 - protein, 19 aa, synthetic construct
PLNGAVHLYAQAQTATVQN

SEQ ID NO: 271 - protein, 19 aa, synthetic construct
PLNGAVHLYAQAQVHPVQN

SEQ ID NO: 272 - protein, 19 aa, synthetic construct
PLNGAVHLYAQAQVSPVQT

SEQ ID NO: 273 - protein, 19 aa, synthetic construct
PLNGAVHLYAQAQISSVQN

SEQ ID NO: 274 - protein, 19 aa, synthetic construct
PLNGAVHLYAQAQVASVQN

SEQ ID NO: 275 - protein, 19 aa, synthetic construct
PLNGAVHLYAQAQTRWDQN

SEQ ID NO: 276 - protein, 19 aa, synthetic construct
PLNGAVHLYAQAQTMTVQN

SEQ ID NO: 277 - protein, 19 aa, synthetic construct
PLNGAVHLYAQAQRSSVQN

SEQ ID NO: 278 - protein, 19 aa, synthetic construct
PLNGGVHLYAQAQTGWVRN

SEQ ID NO: 279 - protein, 19 aa, synthetic construct
PLNGAVHLYAQAQTAWVQN

SEQ ID NO: 280 - protein, 19 aa, synthetic construct
PLNGSVHLYAQAQPGWVQN

SEQ ID NO: 281 - protein, 19 aa, synthetic construct
ALNGAVHLYAQAQTGWAQN

SEQ ID NO: 282 - protein, 19 aa, synthetic construct
PLNGAVHLYAQAQRTGVQN

SEQ ID NO: 283 - protein, 19 aa, synthetic construct
ALNGAVHLYAQAQTGWVQS

SEQ ID NO: 284 - protein, 19 aa, synthetic construct
PLNGAVHLYAQAQVATVQN

SEQ ID NO: 285 - protein, 19 aa, synthetic construct
PLNGAVHLYAQAQVTSVQN

SEQ ID NO: 286 - protein, 19 aa, synthetic construct
PLNGAVHLYAQAQVSSVQN

SEQ ID NO: 287 - protein, 19 aa, synthetic construct
PLNGSVHLYAQAQTSSVQN

SEQ ID NO: 288 - protein, 19 aa, synthetic construct
PLNGAVHLYAQAQTNSVQN

SEQ ID NO: 289 - protein, 19 aa, synthetic construct
PLNGAVHLYAQAQVKAVQN

SEQ ID NO: 290 - protein, 19 aa, synthetic construct
PLNGAVHLYAQAQSGPVQN

SEQ ID NO: 291 - protein, 19 aa, synthetic construct
PLNGAVHLYAQAQTGPVQN

SEQ ID NO: 292 - protein, 19 aa, synthetic construct
PLNGAVHLYAQAQTAMVQN

SEQ ID NO: 293 - protein, 19 aa, synthetic construct
PLNGAVHLYAQAQTQPVQN

SEQ ID NO: 294 - protein, 19 aa, synthetic construct
PLNGSVHLYAQAQTGSVQN

SEQ ID NO: 295 - protein, 19 aa, synthetic construct
PLNGAVHLYAQAQTQQVQN

SEQ ID NO: 296 - protein, 19 aa, synthetic construct
PLNGAVHLYAQAQVSRVQN

SEQ ID NO: 297 - protein, 19 aa, synthetic construct
QLNGAVHLYAQAQVLPVQN

SEQ ID NO: 298 - protein, 19 aa, synthetic construct
PLNGAVHLYAQAQTGWVQP

SEQ ID NO: 299 - protein, 19 aa, synthetic construct
QLNGAVHLYAQAQLGSVQN

SEQ ID NO: 300 - protein, 19 aa, synthetic construct
PLNGAVHLYAQAQVSAVQN

SEQ ID NO: 301 - protein, 19 aa, synthetic construct
PLNGAVHLYAQAQVLSVQN

SEQ ID NO: 302 - protein, 19 aa, synthetic construct
PLNGAVHLYAQAQTQHVQN

SEQ ID NO: 303 - protein, 19 aa, synthetic construct
PLNGAVHLYAQAQLASVQN

SEQ ID NO: 304 - protein, 19 aa, synthetic construct
PLNGAVHLYAQAQQAPVQN

SEQ ID NO: 305 - protein, 19 aa, synthetic construct
PLNGAVHLYAQAQNAQVQN

SEQ ID NO: 306 - protein, 19 aa, synthetic construct
PLNGAVHLYAQAQATPVQN

SEQ ID NO: 307 - protein, 19 aa, synthetic construct
PLNGAVHLYAQAQVQPVQN

SEQ ID NO: 308 - protein, 19 aa, synthetic construct
PLNGAVHLYAQAQTTAVQN

SEQ ID NO: 309 - protein, 19 aa, synthetic construct
PLNGAVHLYAQAQTGWVRN

SEQ ID NO: 310 - protein, 19 aa, synthetic construct
PLNGAVHLYAQAQLAAVQN

SEQ ID NO: 311 - protein, 19 aa, synthetic construct
PLNGAVHLYAQAQTSPDQN

SEQ ID NO: 312 - protein, 19 aa, synthetic construct
PLNGAVHLYAQAQRSGVQN

SEQ ID NO: 313 - protein, 19 aa, synthetic construct
PLNGAVHLYAQAQTGGVQT

SEQ ID NO: 314 - protein, 19 aa, synthetic construct
PLNGAVHLYAQAQTGWVPN

SEQ ID NO: 315 - protein, 19 aa, synthetic construct
PLDSAVHLYAQAQTGWVQN

SEQ ID NO: 316 - protein, 19 aa, synthetic construct
PLNGAVHLYAQAQTTPVQT

SEQ ID NO: 317 - protein, 19 aa, synthetic construct
PLNGAVHLYAQAQLMAVQN

SEQ ID NO: 318 - protein, 19 aa, synthetic construct
PLNGAVHLYAQAQTMPVQN

SEQ ID NO: 319 - protein, 19 aa, synthetic construct
PLNGAVHHYAQAQTSPVQN

SEQ ID NO: 320 - protein, 19 aa, synthetic construct
PLNGAVHLYAQAQLANVQN

SEQ ID NO: 321 - protein, 19 aa, synthetic construct
PLNGAVHLYAQAQVSTVQN

SEQ ID NO: 322 - protein, 19 aa, synthetic construct
PLNGAVHLYAQAQSAQVQN

SEQ ID NO: 323 - protein, 19 aa, synthetic construct
PLNGAVHLYAQAQNTPVQN

SEQ ID NO: 324 - protein, 19 aa, synthetic construct
PLNGAVHLYAQAQVSSVQT

SEQ ID NO: 325 - protein, 19 aa, synthetic construct
PLNGAVHLYAQAQTVSVKN

SEQ ID NO: 326 - protein, 19 aa, synthetic construct
PLNGAVHLYAQPQTGLVQN

SEQ ID NO: 327 - protein, 19 aa, synthetic construct
PLNGAVHLYAQAQTGSVQN

SEQ ID NO: 328 - protein, 19 aa, synthetic construct
SLNGAVHLYAQAQTLPVQN

SEQ ID NO: 329 - protein, 19 aa, synthetic construct
PLNGAVHLYAQAQTGGAQN

SEQ ID NO: 330 - protein, 19 aa, synthetic construct
SLNGAVHLYAQAQTAQVQN

SEQ ID NO: 331 - protein, 19 aa, synthetic construct
PLNGAVHLYAQAQTAVVQN

SEQ ID NO: 332 - protein, 19 aa, synthetic construct
PLNGAVHLYAQAQRLGVQN

SEQ ID NO: 333 - protein, 19 aa, synthetic construct
PLNGSVHLYAQAQTGWVQH

SEQ ID NO: 334 - protein, 19 aa, synthetic construct
PLNGAVHLYAQAQRTLVQN

SEQ ID NO: 335 - protein, 19 aa, synthetic construct
SLNGAVHLYAQAQTMAVQN

SEQ ID NO: 336 - protein, 19 aa, synthetic construct
PLNGAVHLYAQAQTQMVQN

SEQ ID NO: 337 - protein, 19 aa, synthetic construct
PLNGAVHLYAQAQITPVQN

SEQ ID NO: 338 - protein, 19 aa, synthetic construct
PLNGAVHLYAQAQTVWVQK

SEQ ID NO: 339 - protein, 19 aa, synthetic construct
PLNGAVHLYAQAQRSAVQN

SEQ ID NO: 340 - protein, 19 aa, synthetic construct
PLNGAVHLYAQAQTASVQN

SEQ ID NO: 341 - protein, 19 aa, synthetic construct
PLNGAVHLYAQAQTMGVQN

SEQ ID NO: 342 - protein, 19 aa, synthetic construct
PLNGAVHLYAQAQTGGVQH

SEQ ID NO: 343 - protein, 19 aa, synthetic construct
PLNGAVHLYAQAQVQSVQN

SEQ ID NO: 344 - protein, 19 aa, synthetic construct
PLNGAVHLYAQAQTGGVQN

SEQ ID NO: 345 - protein, 19 aa, synthetic construct
SLNGAVHLYAQAQTAPVQN

SEQ ID NO: 346 - protein, 19 aa, synthetic construct
PLNGAVHLYAQAQISPVQN

SEQ ID NO: 347 - protein, 19 aa, synthetic construct
PLNGAVHLYAQPQTGWVKN

SEQ ID NO: 348 - protein, 19 aa, synthetic construct
PLNGAVHLYAQAQTGSAQN

SEQ ID NO: 349 - protein, 19 aa, synthetic construct
PLNGAVHLYAQAQTGWAQN

SEQ ID NO: 350 - protein, 19 aa, synthetic construct
PLNGAVHLYAQAQTMSVQT

SEQ ID NO: 351 - protein, 19 aa, synthetic construct
PLNGSVHLYAQAQTAWVQN

SEQ ID NO: 352 - protein, 19 aa, synthetic construct
PLNGAVHLYAQAQVGGVQN

SEQ ID NO: 353 - protein, 19 aa, synthetic construct
PLNGAVHLYAKAQTSPVQN

SEQ ID NO: 354 - protein, 19 aa, synthetic construct
PLNGAVHLYAQAQLAPVQT

SEQ ID NO: 355 - protein, 19 aa, synthetic construct
PLDGAVHLYAQAQTALVQN

SEQ ID NO: 356 - protein, 19 aa, synthetic construct
PLNGAVHLYAQAQTALVQN

SEQ ID NO: 357 - protein, 19 aa, synthetic construct
PLNGAVHLYAQAQLAGVQN

SEQ ID NO: 358 - protein, 19 aa, synthetic construct
PLNGAVHLYAQAQRTAVQN

SEQ ID NO: 359 - protein, 19 aa, synthetic construct
PLNGAVHLYAQAQRSPVQN

SEQ ID NO: 360 - protein, 19 aa, synthetic construct
PLNGAVHLYAQAQTLAVQN

SEQ ID NO: 361 - protein, 19 aa, synthetic construct
PLNGAVHLYAQAQLAHVQN

SEQ ID NO: 362 - protein, 19 aa, synthetic construct
PLNGAVHLYAQAQTSLVQN

SEQ ID NO: 363 - protein, 19 aa, synthetic construct
PLNGAVHLYAQAQRLSVQN

SEQ ID NO: 364 - protein, 19 aa, synthetic construct
PLNGAVHLYDQAQLSPVQN

SEQ ID NO: 365 - protein, 19 aa, synthetic construct
PLNGAVHLYAQAQLMGVQN

SEQ ID NO: 366 - protein, 19 aa, synthetic construct
PLNGSVHLYAQAQTGWVQT

SEQ ID NO: 367 - protein, 19 aa, synthetic construct
PLNGAVHLYAQAQSMQVQN

SEQ ID NO: 368 - protein, 19 aa, synthetic construct
PLNGGVHLYAQAQTGWFQN

SEQ ID NO: 369 - protein, 19 aa, synthetic construct
PLNGAVHLYAQAQTQTVQN

SEQ ID NO: 370 - protein, 19 aa, synthetic construct
PLDGAVHLYSQAQTGWVQN

SEQ ID NO: 371 - protein, 19 aa, synthetic construct
PLNGAVHLYAQAQTGWEQN

SEQ ID NO: 372 - protein, 19 aa, synthetic construct
PLNGAVHLYAQAQVGSVQN

SEQ ID NO: 373 - protein, 19 aa, synthetic construct
PLNGAVHLYAQAQVSGVQN

SEQ ID NO: 374 - protein, 19 aa, synthetic construct
PLNGAVHLYAQAQVMAVQN

SEQ ID NO: 375 - protein, 19 aa, synthetic construct
PLNGAVHLYAQAQIGGVQN

SEQ ID NO: 376 - protein, 19 aa, synthetic construct
PLNGAVHLYAQAQIAGVQN

SEQ ID NO: 377 - protein, 19 aa, synthetic construct
PLNGAVHLYAKAQTVSVQN

SEQ ID NO: 378 - protein, 19 aa, synthetic construct
PLNGAVHLYSQAQTGRVQN

SEQ ID NO: 379 - protein, 19 aa, synthetic construct
PLNGAVHLYAQAQLSHVQN

SEQ ID NO: 380 - protein, 19 aa, synthetic construct
PLNGAVHLYAQAQVQTVQN

SEQ ID NO: 381 - protein, 19 aa, synthetic construct
SLDGAVHLYAQAQTGWVQN

SEQ ID NO: 382 - protein, 19 aa, synthetic construct
PLNGAVHLYAQPQTGWDQN

SEQ ID NO: 383 - protein, 19 aa, synthetic construct
PLNGAVHLYAQAQRNSVQN

SEQ ID NO: 384 - protein, 19 aa, synthetic construct
PLNGAVHLYAQAQTLPVQN

SEQ ID NO: 385 - protein, 19 aa, synthetic construct
PLNGAVHLYAQAQTKQVQN

SEQ ID NO: 386 - protein, 19 aa, synthetic construct
PLNGSVHLYAQAQTGWVQN

SEQ ID NO: 387 - protein, 19 aa, synthetic construct
PLNGAVHLYAQAQLGQVQN

SEQ ID NO: 388 - protein, 19 aa, synthetic construct
SLNGAVHLYAQAQTGRVQN

SEQ ID NO: 389 - protein, 19 aa, synthetic construct
PLDGAVHLYAQAQTGWVQN

SEQ ID NO: 390 - protein, 19 aa, synthetic construct
PLNGSVHLYAQAQTGWAQN

SEQ ID NO: 391 - protein, 19 aa, synthetic construct
TLNGAVHLYAQAQVASVQN

SEQ ID NO: 392 - protein, 19 aa, synthetic construct
PLNGAVHLYAQAQNMQVQN

SEQ ID NO: 393 - protein, 19 aa, synthetic construct
PLNGAVHLYAQAQNVQVQN

SEQ ID NO: 394 - protein, 19 aa, synthetic construct
PLNGAVHLYAQAQTGSVQI

SEQ ID NO: 395 - protein, 19 aa, synthetic construct
PLNGTVHLYAQAQTGGVQN

SEQ ID NO: 396 - protein, 19 aa, synthetic construct
PLNGAVHLYAKAQVSPVQN

SEQ ID NO: 397 - protein, 19 aa, synthetic construct
PLNGAVHLYAQAQRGGVQN

SEQ ID NO: 398 - protein, 19 aa, synthetic construct
PLNGGVHLYAQAQTGLVQN

SEQ ID NO: 399 - protein, 19 aa, synthetic construct
PLNGAVHLYAQAQVMSVQN

SEQ ID NO: 400 - protein, 19 aa, synthetic construct
PLNGAVHLYAQAQTTGVQN

SEQ ID NO: 401 - protein, 19 aa, synthetic construct
PLNGAVHLYAQAQLSPVQK

SEQ ID NO: 402 - protein, 19 aa, synthetic construct
SLNGAVHLYAQAQTAAVQN

SEQ ID NO: 403 - protein, 19 aa, synthetic construct
PINGAVHLYAQAQTSPVQN

SEQ ID NO: 404 - protein, 19 aa, synthetic construct
PLNGAVHLYAQAQLSRVQN

SEQ ID NO: 405 - protein, 19 aa, synthetic construct
PLNGAVHLYAQAQVSSVQK

SEQ ID NO: 406 - protein, 19 aa, synthetic construct
PLNGAVHLYAQAQTAPVQT

SEQ ID NO: 407 - protein, 19 aa, synthetic construct
PLNGAVHLYAQAQMAPVQN

SEQ ID NO: 408 - protein, 19 aa, synthetic construct
PLNGAVHLYAQAQILGVQN

SEQ ID NO: 409 - protein, 19 aa, synthetic construct
PLNGAVHLYAQAQTASVQT

SEQ ID NO: 410 - protein, 19 aa, synthetic construct
PLNGAVHLYAQAQTGSLQN

SEQ ID NO: 411 - protein, 19 aa, synthetic construct
PLNGAVHLYAQAQTGTVQN

SEQ ID NO: 412 - protein, 19 aa, synthetic construct
PLNGGVHLYAQAQTGWVQN

SEQ ID NO: 413 - protein, 19 aa, synthetic construct
PLNGAVHLYAQAQTGSVQT

SEQ ID NO: 414 - protein, 19 aa, synthetic construct
PLNGAVHLYAQAQTSSVQT

SEQ ID NO: 415 - protein, 19 aa, synthetic construct
PLNGAVHLYAQAQTSHVQN

SEQ ID NO: 416 - protein, 19 aa, synthetic construct
PLNGGVHLYAQAQTGWDQN

SEQ ID NO: 417 - protein, 19 aa, synthetic construct
PLNGAVHLYAQAQRIGVQN

SEQ ID NO: 418 - protein, 19 aa, synthetic construct
TLNGAVHLYAQAQTTSVQN

SEQ ID NO: 419 - protein, 19 aa, synthetic construct
PLNGAVHLYAQAQTGWGQT

SEQ ID NO: 420 - protein, 19 aa, synthetic construct
PLNGAVHLYAQAQSAMVQN

SEQ ID NO: 421 - protein, 19 aa, synthetic construct
PLNGAVHLYAQAQTSMVQN

SEQ ID NO: 422 - protein, 19 aa, synthetic construct
PLNGAVHLYAQAQSMGVQN

SEQ ID NO: 423 - protein, 19 aa, synthetic construct
PLNGAVHLYAQAQSMSVQN

SEQ ID NO: 424 - protein, 19 aa, synthetic construct
PLNGAVHLYAQAQTSSVQN

SEQ ID NO: 425 - protein, 19 aa, synthetic construct
PLNGAVHLYAQAQTSGVQN

SEQ ID NO: 426 - protein, 19 aa, synthetic construct
PLNGAVHLYAQAQTGAVQN

SEQ ID NO: 427 - protein, 19 aa, synthetic construct
PLNGAVHLYAQAQVNSVQN

SEQ ID NO: 428 - protein, 19 aa, synthetic construct
PLNGAVHLYAQAQVAGVQN

SEQ ID NO: 429 - protein, 19 aa, synthetic construct
PLNGAVHLYAQAQIGSVQN

SEQ ID NO: 430 - protein, 19 aa, synthetic construct
PLDGAVHVYAQAQTGWVQN

SEQ ID NO: 431 - protein, 19 aa, synthetic construct
TLNGAVHLYAQAQTTPVQN

SEQ ID NO: 432 - protein, 19 aa, synthetic construct
PLNGAVHLYAQAQLGSVQN

SEQ ID NO: 433 - protein, 19 aa, synthetic construct
PLNGAVHLYAQAQVNGVQN

SEQ ID NO: 434 - protein, 19 aa, synthetic construct
QLNGAVHLYAQAQLSSVQN

SEQ ID NO: 435 - protein, 19 aa, synthetic construct
PLNGAVHLYAQAQLTAVQN

SEQ ID NO: 436 - protein, 19 aa, synthetic construct
PLNGAVHLYAQAQVQNVQN

SEQ ID NO: 437 - protein, 19 aa, synthetic construct
PLNGAVHLYAQAQTKSVQN

SEQ ID NO: 438 - protein, 19 aa, synthetic construct
PLNGAVHLYAQAQSVGVQN

SEQ ID NO: 439 - protein, 19 aa, synthetic construct
QLNGAVHLYAQAQLGPVQN

SEQ ID NO: 440 - protein, 19 aa, synthetic construct
PLNGAVHLYAQAQTAWVQT

SEQ ID NO: 441 - protein, 19 aa, synthetic construct
PLNGAVHLYAQAQNASVQN

SEQ ID NO: 442 - protein, 19 aa, synthetic construct
PLNGAVHLYAQAQTSAVQN

SEQ ID NO: 443 - protein, 19 aa, synthetic construct
ALNGAVHLYAQAQLAAVQN

SEQ ID NO: 444 - protein, 19 aa, synthetic construct
PLNGAVHLYDQAQVSPVQN

SEQ ID NO: 445 - protein, 19 aa, synthetic construct
PLNGAVHLYAQAQTMSVKN

SEQ ID NO: 446 - protein, 19 aa, synthetic construct
PLNGAVHLYAQAQTANVQN

SEQ ID NO: 447 - protein, 19 aa, synthetic construct
PLNGAVHLYAQAQTGWFQN

SEQ ID NO: 448 - protein, 19 aa, synthetic construct
PLNGNVHLYAQAQTGWVQN

SEQ ID NO: 449 - protein, 19 aa, synthetic construct
PLNGSVHLYAQAQTGWVQS

SEQ ID NO: 450 - protein, 19 aa, synthetic construct
PLNGAVHLYAQAQTGGVLN

SEQ ID NO: 451 - protein, 19 aa, synthetic construct
PLNGAVHLYAQAQLTSVQN

SEQ ID NO: 452 - protein, 19 aa, synthetic construct
PLNGAVHLYAQAQTGWVQT

SEQ ID NO: 453 - protein, 19 aa, synthetic construct
PLNGAVHLYAQAQRSQVQN

SEQ ID NO: 454 - protein, 19 aa, synthetic construct
PLNGAVHIYAQAQVSPVQN

SEQ ID NO: 455 - protein, 19 aa, synthetic construct
PLNGSVHLYAQAQTGWFQN

SEQ ID NO: 456 - protein, 19 aa, synthetic construct
PLNGAVHLYAQAQRIPVQN

SEQ ID NO: 457 - protein, 19 aa, synthetic construct
QLNGAVHLYAQAQLVPVQN

SEQ ID NO: 458 - protein, 19 aa, synthetic construct
PLNGAVHLYAQAQTGWVQD

SEQ ID NO: 459 - protein, 19 aa, synthetic construct
PLNGAVHLYAKAQVSSVQN

SEQ ID NO: 460 - protein, 19 aa, synthetic construct
PLNGAVHLYAQAQRVEVQN

SEQ ID NO: 461 - protein, 19 aa, synthetic construct
PLNGAVHLYAQAQVLPVQN

SEQ ID NO: 462 - protein, 19 aa, synthetic construct
PLNGSVHLYAQAQTGWVRN

SEQ ID NO: 463 - protein, 19 aa, synthetic construct
PLNGTVHLYAQAQSSPVQN

SEQ ID NO: 464 - protein, 19 aa, synthetic construct
PLNGAVHLYAQAQTGGVQK

SEQ ID NO: 465 - protein, 19 aa, synthetic construct
PLNGAVHLYAQAQSVAVQN

SEQ ID NO: 466 - protein, 19 aa, synthetic construct
QLNGAVHLYAQAQLSGVQN

SEQ ID NO: 467 - protein, 19 aa, synthetic construct
PLNGAVHLYAQAQLQQVQN

SEQ ID NO: 468 - protein, 19 aa, synthetic construct
PLNGAVHLYAQAQLSTVQN

SEQ ID NO: 469 - protein, 19 aa, synthetic construct
PLNGAVHLYAQAQSAAVQN

SEQ ID NO: 470 - protein, 19 aa, synthetic construct
SLNGAVHLYAQAQVSAVQN

SEQ ID NO: 471 - protein, 19 aa, synthetic construct
PLNGAVHLYAQAQRTSVQN

SEQ ID NO: 472 - protein, 19 aa, synthetic construct
PLNGAVHLYAQAQTQNVQN

SEQ ID NO: 473 - protein, 19 aa, synthetic construct
PLNGAVHLYAQAQVNAVQN

SEQ ID NO: 474 - protein, 19 aa, synthetic construct
PLNGAVHLYAQAQTVAVQT

SEQ ID NO: 475 - protein, 19 aa, synthetic construct
PLNGAVHLYAQAQLMSVQN

SEQ ID NO: 476 - protein, 19 aa, synthetic construct
PLNGAVHLYAQAQTGWVQN

SEQ ID NO: 477 - protein, 19 aa, synthetic construct
PLNGAVHLYAHAQTGWVQH

SEQ ID NO: 478 - protein, 19 aa, synthetic construct
PLNGAVHLYAQAQTGWVQH

SEQ ID NO: 479 - protein, 19 aa, synthetic construct
PLNGAVHHYAQAQTMSVQN

SEQ ID NO: 480 - protein, 19 aa, synthetic construct
PLNGAVHLYAQAQTGWVQS

SEQ ID NO: 481 - protein, 19 aa, synthetic construct
PLNGAVHLYDQAQTTPVQN

SEQ ID NO: 482 - protein, 19 aa, synthetic construct
PLNGAVHLYAQAQTMMVQN

SEQ ID NO: 483 - protein, 19 aa, synthetic construct
PLNGAVHLYAQAQTGGVQS

SEQ ID NO: 484 - protein, 19 aa, synthetic construct
PLNGAVNLYAQAQTSPVQN

SEQ ID NO: 485 - protein, 19 aa, synthetic construct
ALNGAVHLYAQAQTGLVQN

SEQ ID NO: 486 - protein, 19 aa, synthetic construct
ALNGAVHLYAQAQVATVQN

SEQ ID NO: 487 - protein, 19 aa, synthetic construct
PLNGAVHLYAQAQTGSFQN

SEQ ID NO: 488 - protein, 19 aa, synthetic construct
PLNGAVHLYAQAQRSVVQN

SEQ ID NO: 489 - protein, 19 aa, synthetic construct
PLNGAVHLYAQAQTGSVQK

SEQ ID NO: 490 - protein, 19 aa, synthetic construct
PLNGAVHLYAQAQTQLVQN

SEQ ID NO: 491 - protein, 19 aa, synthetic construct
PLNGAVHLYAQAQTGGVHN

SEQ ID NO: 492 - protein, 19 aa, synthetic construct
PLNGAVHLYAQAQRTPVQN

SEQ ID NO: 493 - protein, 19 aa, synthetic construct
PLNGAVHLYAQAQRQQVQN

SEQ ID NO: 494 - protein, 19 aa, synthetic construct
PLNGAVHLYAQAQTGSVRN

SEQ ID NO: 495 - protein, 19 aa, synthetic construct
PLNGAVHLYAQAQVQGVQN

SEQ ID NO: 496 - protein, 19 aa, synthetic construct
TLNGAVHLYAQAQVSPVQN

SEQ ID NO: 497 - protein, 19 aa, synthetic construct
PLNGAVHLYAQAQPGWVQT

SEQ ID NO: 498 - protein, 19 aa, synthetic construct
PLNGAVHLYAQAQSTQVQN

SEQ ID NO: 499 - protein, 19 aa, synthetic construct
PLNGSVHLYAQAQTGWVEN

SEQ ID NO: 500 - protein, 19 aa, synthetic construct
PLNGAVHLYAQAQQSPVQN

SEQ ID NO: 501 - protein, 19 aa, synthetic construct
PLNGAVHLYAQAQRYSVQN

SEQ ID NO: 502 - protein, 19 aa, synthetic construct
PLNGAVHLYAQAQTGWDQN

SEQ ID NO: 503 - protein, 19 aa, synthetic construct
PLNGAVHLYAQAQTQRVQN

SEQ ID NO: 504 - protein, 19 aa, synthetic construct
ALNGAVHLYAQAQTGWVRN

SEQ ID NO: 505 - protein, 19 aa, synthetic construct
PLNGAVHLYAQPQTGWVQN

SEQ ID NO: 506 - protein, 19 aa, synthetic construct
ALNGAVHLYAQAQVSGVQN

SEQ ID NO: 507 - protein, 19 aa, synthetic construct
PLNGAVHLYAQAQSAGVQN

SEQ ID NO: 508 - protein, 19 aa, synthetic construct
PLNGAVHLYAQAQSAPVQT

SEQ ID NO: 509 - protein, 19 aa, synthetic construct
PLNGAVHLYAQAQRQSVQN

SEQ ID NO: 510 - protein, 19 aa, synthetic construct
PLNGAVHLYAQAQSQPVQN

SEQ ID NO: 511 - protein, 19 aa, synthetic construct
PLNGAVHLYAQAQVASVKN

SEQ ID NO: 512 - protein, 19 aa, synthetic construct
PLNGAVHLYAQAQTAWVRN

SEQ ID NO: 513 - protein, 19 aa, synthetic construct
SLNGAVHLYAQAQTMQVQN

SEQ ID NO: 514 - protein, 19 aa, synthetic construct
PLNGAVNLYAQAQSSPVQN

SEQ ID NO: 515 - protein, 19 aa, synthetic construct
PLNGAVHLYAQAQTGGGQN

SEQ ID NO: 516 - protein, 19 aa, synthetic construct
PLNGAVHLYDQAQVASVQN

SEQ ID NO: 517 - protein, 19 aa, synthetic construct
PLNGAVHLYAQAQSTSVQN

SEQ ID NO: 518 - protein, 19 aa, synthetic construct
PLNGTVHLYAQAQTGWVQH

SEQ ID NO: 519 - protein, 19 aa, synthetic construct
QLNGAVHLYAQAQTSSVQN

SEQ ID NO: 520 - protein, 19 aa, synthetic construct
PLDGAVHLYAQAQTGWVHN

SEQ ID NO: 521 - protein, 19 aa, synthetic construct
PLNGTVHLYAQAQTGWVQK

SEQ ID NO: 522 - protein, 19 aa, synthetic construct
PLNGAVHLYAQAQVLGVQN

SEQ ID NO: 523 - protein, 19 aa, synthetic construct
PLNGAVHLYAQAQNQPVQN

SEQ ID NO: 524 - protein, 19 aa, synthetic construct
PLNGAVHLYAQAQLGTVQN

SEQ ID NO: 525 - protein, 19 aa, synthetic construct
PLNGAVHLYAQAQRAGVQN

SEQ ID NO: 526 - protein, 19 aa, synthetic construct
PVNGAVHLYAQAQTGLVQN

SEQ ID NO: 527 - protein, 19 aa, synthetic construct
PLNGGVHLYAQAQTGWVQH

SEQ ID NO: 528 - protein, 19 aa, synthetic construct
PLNGAVHLYAQAQTGRVQN

SEQ ID NO: 529 - protein, 19 aa, synthetic construct
PLNGAVHLYAQAQTGGVKN

SEQ ID NO: 530 - protein, 19 aa, synthetic construct
PLNGAVHLYAQAQTAWLQN

SEQ ID NO: 531 - protein, 19 aa, synthetic construct
PLNGAVHLYAQAQTRWVQK

SEQ ID NO: 532 - protein, 19 aa, synthetic construct
PLNGAVHLYAQAQLAPVKN

SEQ ID NO: 533 - protein, 19 aa, synthetic construct
PLNGAVHHYAQAQTSSVQN

SEQ ID NO: 534 - protein, 19 aa, synthetic construct
PLNGAVHLYAQAQTGSVQD

SEQ ID NO: 535 - protein, 19 aa, synthetic construct
PLNGAVHLYAQAQTGMVQN

SEQ ID NO: 536 - protein, 19 aa, synthetic construct
PLNGAVHLYAQAQLSNVQN

SEQ ID NO: 537 - protein, 19 aa, synthetic construct
PLNGAVHLYAQAQRLPVQN

SEQ ID NO: 538 - protein, 19 aa, synthetic construct
PLNGAVHLYAQAQRQGVQN

SEQ ID NO: 539 - protein, 19 aa, synthetic construct
PLNGAVHLYAQAQSTPVQT

SEQ ID NO: 540 - protein, 19 aa, synthetic construct
QLNGNVHLYAQAQTGWVQN

SEQ ID NO: 541 - protein, 19 aa, synthetic construct
PLNGGVHLYAQAQTGWVQT

SEQ ID NO: 542 - protein, 19 aa, synthetic construct
PLNGAVHLYAQAQTTPVKN

SEQ ID NO: 543 - protein, 19 aa, synthetic construct
PLNGAVHLYAQAQRLTVQN

SEQ ID NO: 544 - protein, 19 aa, synthetic construct
PLNGAVHLYAQAQTLRVQN

SEQ ID NO: 545 - protein, 19 aa, synthetic construct
PLNGAVHLYAQAQSAFVQN

SEQ ID NO: 546 - protein, 19 aa, synthetic construct
SLNGAVHLYAQAQTNSVQN

SEQ ID NO: 547 - protein, 19 aa, synthetic construct
PLNGAVHLYAQAQSVQVQN

SEQ ID NO: 548 - protein, 19 aa, synthetic construct
PLDGAVHLYAQAQTAAVQN

SEQ ID NO: 549 - protein, 19 aa, synthetic construct
SLNGAVHLYAQAQLMPVQN

SEQ ID NO: 550 - protein, 19 aa, synthetic construct
PLDGAVHLYAQAQTGWVQT

SEQ ID NO: 551 - protein, 19 aa, synthetic construct
PLNGAVHLYAQAQLLPVQN

SEQ ID NO: 552 - protein, 19 aa, synthetic construct
PLNGAVHLYAQAQRTQVQN

SEQ ID NO: 553 - protein, 19 aa, synthetic construct
PLNGAVHLYAQAQTGSDQN

SEQ ID NO: 554 - protein, 19 aa, synthetic construct
PLNGAVHLYAQAQVASDQN

SEQ ID NO: 555 - protein, 19 aa, synthetic construct
PLNGAVNLYAQAQLAPVQN

SEQ ID NO: 556 - protein, 19 aa, synthetic construct
PLNGSVHLYAQAQTGWLQN

SEQ ID NO: 557 - protein, 19 aa, synthetic construct
PLNGTVHLYAQAQTGWVQN

SEQ ID NO: 558 - protein, 19 aa, synthetic construct
PLNGAVHLYAQAQVSPVKN

SEQ ID NO: 559 - protein, 19 aa, synthetic construct
PLNGAVHLYAQAQLPPVQN

SEQ ID NO: 560 - protein, 19 aa, synthetic construct
PLNGAVHLYAQAQSSPVQT

SEQ ID NO: 561 - protein, 19 aa, synthetic construct
PLNGAVHLYAQAQAQPVQN

SEQ ID NO: 562 - protein, 19 aa, synthetic construct
PLNGDVHLYAQAQTTSVQN

SEQ ID NO: 563 - protein, 19 aa, synthetic construct
PLNGAVHLYAQAQTPQVQN

SEQ ID NO: 564 - protein, 19 aa, synthetic construct
PLNGAVHLYAQAQTSWVQN

SEQ ID NO: 565 - protein, 19 aa, synthetic construct
PLNGAVHLYAQAQTGGDQN

SEQ ID NO: 566 - protein, 19 aa, synthetic construct
PLNGAVHLYAQAQLSPVKN

SEQ ID NO: 567 - protein, 19 aa, synthetic construct
PLNGAVHLYAQAQSSPVKN

SEQ ID NO: 568 - protein, 19 aa, synthetic construct
PLNGAVHLYAQAQNTTVQN

SEQ ID NO: 569 - protein, 19 aa, synthetic construct
PLDGAVHLYAQAQTGWVQH

SEQ ID NO: 570 - protein, 19 aa, synthetic construct
PLNGAVHLYAQAQTTRVQN

SEQ ID NO: 571 - protein, 19 aa, synthetic construct
PLDGAVHLYAQAQTGWLQN

SEQ ID NO: 572 - protein, 19 aa, synthetic construct
PLNGSVHLYAQPQTGWVQN

SEQ ID NO: 573 - protein, 19 aa, synthetic construct
PLNGAVHLYSQAQTGLVQN

SEQ ID NO: 574 - protein, 19 aa, synthetic construct
PLNGAVHLYAQAQTQWVQN

SEQ ID NO: 575 - protein, 19 aa, synthetic construct
PLNGSVHLYAQAQTGWVQI

SEQ ID NO: 576 - protein, 19 aa, synthetic construct
PLNGAVHLYAQAQTGSVHN

SEQ ID NO: 577 - protein, 19 aa, synthetic construct
ALNGAVHLYAQAQTGWVQN

SEQ ID NO: 578 - protein, 19 aa, synthetic construct
PLNGTVHLYAQAQTGWVRN

SEQ ID NO: 579 - protein, 19 aa, synthetic construct
PLNGAVHLYAQAQTGGLQN

SEQ ID NO: 580 - protein, 19 aa, synthetic construct
SLNGAVHLYAQAQVSGVQN

SEQ ID NO: 581 - protein, 19 aa, synthetic construct
PLNGAVHLYAQAQTAWVQK

SEQ ID NO: 582 - protein, 19 aa, synthetic construct
PLNGAVHLYAQAQTGRVQT

SEQ ID NO: 583 - protein, 19 aa, synthetic construct
TLNGAVHLYAQAQSAPVQN

SEQ ID NO: 584 - protein, 19 aa, synthetic construct
PLNGAVHLYDQAQTVAVQN

SEQ ID NO: 585 - protein, 19 aa, synthetic construct
QLNGAVHLYAQAQTGSVQN

SEQ ID NO: 586 - protein, 19 aa, synthetic construct
PLNGAVHLYAQAQNTQVQN

SEQ ID NO: 587 - protein, 19 aa, synthetic construct
PLNGAVHLYAQAQTGWLQN

SEQ ID NO: 588 - protein, 19 aa, synthetic construct
PINGAVHLYAQAQTGLVQN

SEQ ID NO: 589 - protein, 19 aa, synthetic construct
PLDGAVHLYAQAQTGWVQI

SEQ ID NO: 590 - protein, 19 aa, synthetic construct
PLNGSVHLYAQAQTGSVQT

SEQ ID NO: 591 - protein, 19 aa, synthetic construct
PLNGAVQLYAQAQTSSVQN

SEQ ID NO: 592 - protein, 19 aa, synthetic construct
PLNGAVHLYAQAQTYAVQN

SEQ ID NO: 593 - protein, 19 aa, synthetic construct
PLNGAVHLYAQAQTLSVQN

SEQ ID NO: 594 - protein, 19 aa, synthetic construct
PLNGAVHLYAQAQNLPVQN

SEQ ID NO: 595 - protein, 19 aa, synthetic construct
PLNGAVHLYAQAQTSSDQN

SEQ ID NO: 596 - protein, 19 aa, synthetic construct
PLNGAVHLYAQAQATSVQN

SEQ ID NO: 597 - protein, 19 aa, synthetic construct
TLNGAVHLYAQAQLSPVQN

SEQ ID NO: 598 - protein, 19 aa, synthetic construct
PLNGAVHLYAQAQTAWFQN

SEQ ID NO: 599 - protein, 19 aa, synthetic construct
TLNGAVHLYAQAQVTPVQN

SEQ ID NO: 600 - protein, 19 aa, synthetic construct
TLNGAVHLYAQAQTAAVQN

SEQ ID NO: 601 - protein, 19 aa, synthetic construct
PLNGAVHLYAQAQATQVQN

SEQ ID NO: 602 - protein, 19 aa, synthetic construct
RLDGAVHLYAQAQTGWVQN

SEQ ID NO: 603 - protein, 19 aa, synthetic construct
QLNGAVHLYAQAQTGWVEN

SEQ ID NO: 604 - protein, 19 aa, synthetic construct
PLNGAVHLYAQAQVSSVKN

SEQ ID NO: 605 - protein, 19 aa, synthetic construct
PLNGAVHLYAQAQLSSVQN

SEQ ID NO: 606 - protein, 19 aa, synthetic construct
PLNGAVHLYAQAQTGSGQN

SEQ ID NO: 607 - protein, 19 aa, synthetic construct
PLNGAVHLYAQAQLQPVQT

SEQ ID NO: 608 - protein, 19 aa, synthetic construct
PINGAVHLYAQAQLSSVQN

SEQ ID NO: 609 - protein, 19 aa, synthetic construct
PINGAVHLYAQAQTVAVQN

SEQ ID NO: 610 - protein, 19 aa, synthetic construct
PLNGAVHLYAQAQVSAVKN

SEQ ID NO: 611 - protein, 19 aa, synthetic construct
SLNGAVHLYAQAQTVAVQN

SEQ ID NO: 612 - protein, 19 aa, synthetic construct
PLNGAVHLYAQAQTQAVQN

SEQ ID NO: 613 - protein, 19 aa, synthetic construct
QLNGAVHLYAQAQTAQVQN

SEQ ID NO: 614 - protein, 19 aa, synthetic construct
PLNGAVHLYDQAQTMSVQN

SEQ ID NO: 615 - protein, 19 aa, synthetic construct
PLNGAVHLYAQPQTGWVQK

SEQ ID NO: 616 - protein, 19 aa, synthetic construct
PLNGAVHLYAQAQVMPVQN

SEQ ID NO: 617 - protein, 19 aa, synthetic construct
PLNGAVHLYAQAQTVSVQK

SEQ ID NO: 618 - protein, 19 aa, synthetic construct
PLNGAVHLYAQAQTAWAQN

SEQ ID NO: 619 - protein, 19 aa, synthetic construct
PLNGAVHLYAQAQNALVQN

SEQ ID NO: 620 - protein, 19 aa, synthetic construct
TLNGAVHLYAQAQVSAVQN

SEQ ID NO: 621 - protein, 19 aa, synthetic construct
PLKGAVHLYAQAQTTPVQN

SEQ ID NO: 622 - protein, 19 aa, synthetic construct
QLNGSVHLYAQAQTGWVQN

SEQ ID NO: 623 - protein, 19 aa, synthetic construct
SLNGAVHLYAQAQVATVQN

SEQ ID NO: 624 - protein, 19 aa, synthetic construct
PLNGAVHLYAQAQRMLVQN

SEQ ID NO: 625 - protein, 19 aa, synthetic construct
PLNGAVHLYAQAQTVAVKN

SEQ ID NO: 626 - protein, 19 aa, synthetic construct
PLNGAVHLYDQAQTTSVQN

SEQ ID NO: 627 - protein, 19 aa, synthetic construct
PLNGAVHLYAQAQRQLVQN

SEQ ID NO: 628 - protein, 19 aa, synthetic construct
PLNGAVHLYAQAQTLGVQN

SEQ ID NO: 629 - protein, 19 aa, synthetic construct
PLNGAVHLYAQAQLGPVQT

SEQ ID NO: 630 - protein, 19 aa, synthetic construct
PLNGGVHLYAQAQTGWVQD

SEQ ID NO: 631 - protein, 19 aa, synthetic construct
PLNGAVHLYAQAQTGSVKN

SEQ ID NO: 632 - protein, 19 aa, synthetic construct
PLNGAVNLYAQAQLASVQN

SEQ ID NO: 633 - protein, 19 aa, synthetic construct
PLNGAVHLYDQAQVSSVQN

SEQ ID NO: 634 - protein, 19 aa, synthetic construct
PLNGAVHLYAQAQTMSDQN

SEQ ID NO: 635 - protein, 19 aa, synthetic construct
PLNGAVHLYAQAQTGWVQK

SEQ ID NO: 636 - protein, 19 aa, synthetic construct
PLNGAVHLYAQAQLASVKN

SEQ ID NO: 637 - protein, 19 aa, synthetic construct
PLNGGVHLYAQAQTGWGQN

SEQ ID NO: 638 - protein, 19 aa, synthetic construct
QLNGSVHLYAQAQTGWVQT

SEQ ID NO: 639 - protein, 19 aa, synthetic construct
QLNGAVHLYAQAQTTGVQN

SEQ ID NO: 640 - protein, 19 aa, synthetic construct
PLNGAVHLYAQAQTGFVQN

SEQ ID NO: 641 - protein, 19 aa, synthetic construct
PLNGAVHLYAQAQSALVQN

SEQ ID NO: 642 - protein, 19 aa, synthetic construct
ALNGAVHLYAQAQTGWDQN

SEQ ID NO: 643 - protein, 19 aa, synthetic construct
QLNGAVHLYAQAQISGVQN

SEQ ID NO: 644 - protein, 19 aa, synthetic construct
QLNGAVHLYAQAQRGSVQN

SEQ ID NO: 645 - protein, 19 aa, synthetic construct
PLNGAVHLYAQAQTGWVKT

SEQ ID NO: 646 - protein, 19 aa, synthetic construct
PLNGAVHLYAQAQSQLVQN

SEQ ID NO: 647 - protein, 19 aa, synthetic construct
PLNGSVHLYAQAQTGWGQN

SEQ ID NO: 648 - protein, 19 aa, synthetic construct
QLNGAVHLYAQAQTGWVPN

SEQ ID NO: 649 - protein, 19 aa, synthetic construct
PLNGAVHLYAKAQTGWVKN

SEQ ID NO: 650 - protein, 19 aa, synthetic construct
PLNGAVHLYAHAQTGWGQN

SEQ ID NO: 651 - protein, 19 aa, synthetic construct
ALNGAVHLYAQAQTGWVQH

SEQ ID NO: 652 - protein, 19 aa, synthetic construct
PLNGSVHLYAQAQIASVQN

SEQ ID NO: 653 - protein, 19 aa, synthetic construct
ALNGAVHLYAQAQTAMVQN

SEQ ID NO: 654 - protein, 19 aa, synthetic construct
TLNGAVHLYAQAQTMAVQN

SEQ ID NO: 655 - protein, 19 aa, synthetic construct
PHNGAVHLYAQAQVSSVQN

SEQ ID NO: 656 - protein, 19 aa, synthetic construct
PLNGAVQLYAQAQTAPVQN

SEQ ID NO: 657 - protein, 19 aa, synthetic construct
PLNGSVHLYAQAQKGSVQN

SEQ ID NO: 658 - protein, 19 aa, synthetic construct
PLNGAVHLYAQAQLSAVQN

SEQ ID NO: 659 - protein, 19 aa, synthetic construct
PINGAVHLYAQAQVSAVQN

SEQ ID NO: 660 - protein, 19 aa, synthetic construct
PLNGSVHLYAQAQTGLVQN

SEQ ID NO: 661 - protein, 19 aa, synthetic construct
PLNGAVHIYAQAQTGWFQN

SEQ ID NO: 662 - protein, 19 aa, synthetic construct
SLNGAVHLYAQAQIASVQN

SEQ ID NO: 663 - protein, 19 aa, synthetic construct
PLNGAVHLYAQEQTVSVQN

SEQ ID NO: 664 - protein, 19 aa, synthetic construct
PLNGAVHLYAQAQTMQVQT

SEQ ID NO: 665 - protein, 19 aa, synthetic construct
HLNGAVHLYAQAQTGWVQN

SEQ ID NO: 666 - protein, 19 aa, synthetic construct
PLNGAVHLYAQAQTGQVQN

SEQ ID NO: 667 - protein, 19 aa, synthetic construct
QLNGAVHLYAQAQTGWVQD

SEQ ID NO: 668 - protein, 19 aa, synthetic construct
PLNGAVHLYDQAQVAQVQN

SEQ ID NO: 669 - protein, 19 aa, synthetic construct
PLNGAVHLYAQAQTSPVKN

SEQ ID NO: 670 - protein, 19 aa, synthetic construct
PLNGAIHLYAQAQTSPVQN

SEQ ID NO: 671 - protein, 19 aa, synthetic construct
PLNGSVHLYAQAQTAMVQN

SEQ ID NO: 672 - protein, 19 aa, synthetic construct
PLNGAVHLYAQAQLSQVQT

SEQ ID NO: 673 - protein, 19 aa, synthetic construct
PLNGAVHLYAQAQTGSVLN

SEQ ID NO: 674 - protein, 19 aa, synthetic construct
PLNGAIHLYAQAQTASVQN

SEQ ID NO: 675 - protein, 19 aa, synthetic construct
PLNGAVHLYAQAQTNGVQN

SEQ ID NO: 676 - protein, 19 aa, synthetic construct
PLNGSVHLYAQAQTGWVQY

SEQ ID NO: 677 - protein, 19 aa, synthetic construct
PLNGALHLYAQAQTSPVQN

SEQ ID NO: 678 - protein, 19 aa, synthetic construct
ALNGAVHLYAQAQTGWVQT

SEQ ID NO: 679 - protein, 19 aa, synthetic construct
PLNGAVHLYAQAQTGWVKK

SEQ ID NO: 680 - protein, 19 aa, synthetic construct
QLNGAVHLYAQAQTGWVQN

SEQ ID NO: 681 - protein, 19 aa, synthetic construct
PLNGDVHLYAQAQTVAVQN

SEQ ID NO: 682 - protein, 19 aa, synthetic construct
PLNGGVHLYAQAQPGWVQN

SEQ ID NO: 683 - protein, 19 aa, synthetic construct
PLNGAVHLYAQAQAAAVQN

SEQ ID NO: 684 - protein, 19 aa, synthetic construct
PLNGAVHLYAQAQSAVVQN

SEQ ID NO: 685 - protein, 19 aa, synthetic construct
TLNGAVHLYAQAQRSSVQN

SEQ ID NO: 686 - protein, 19 aa, synthetic construct
PLNGAVHLYAQAQPGWVQH

SEQ ID NO: 687 - protein, 19 aa, synthetic construct
PLDGAVHLYAQAQTLSVQN

SEQ ID NO: 688 - protein, 19 aa, synthetic construct
PLNGAVHLYAQAQTASDQN

SEQ ID NO: 689 - protein, 19 aa, synthetic construct
PLNGAVHLYAQAQLSGVQN

SEQ ID NO: 690 - protein, 19 aa, synthetic construct
TLNGAVHLYAQAQTVAVQN

SEQ ID NO: 691 - protein, 19 aa, synthetic construct
PLNGAVHLYAQEQVASVQN

SEQ ID NO: 692 - protein, 19 aa, synthetic construct
PVNGAVHLYAQAQTGWAQN

SEQ ID NO: 693 - protein, 19 aa, synthetic construct
PLNGAVHLYAQAQSSRVQN

SEQ ID NO: 694 - protein, 19 aa, synthetic construct
PLNGSVHLYAQAQLGSVQN

SEQ ID NO: 695 - protein, 19 aa, synthetic construct
PLNGAVHLYAQAQSPPVQN

SEQ ID NO: 696 - protein, 19 aa, synthetic construct
PLNGAVHHYAQAQTTSVQN

SEQ ID NO: 697 - protein, 19 aa, synthetic construct
PLNGAVHLYDQAQSTPVQN

SEQ ID NO: 698 - protein, 19 aa, synthetic construct
QLNGAVHLYAQAQTGWVRN

SEQ ID NO: 699 - protein, 19 aa, synthetic construct
PLNGAVHLYAQAQVQPVQT

SEQ ID NO: 700 - protein, 19 aa, synthetic construct
PLNGAVHLYAQAQTSSVKN

SEQ ID NO: 701 - protein, 19 aa, synthetic construct
PLNGALHLYAQAQTASVQN

SEQ ID NO: 702 - protein, 19 aa, synthetic construct
PLNGAVHHYAQAQSAPVQN

SEQ ID NO: 703 - protein, 19 aa, synthetic construct
PLNGSVHLYAQAQTGWVHN

SEQ ID NO: 704 - protein, 19 aa, synthetic construct
PLNGAVHLYAQAQLSPLQN

SEQ ID NO: 705 - protein, 19 aa, synthetic construct
PLNGAVHLYAKAQVTPVQN

SEQ ID NO: 706 - protein, 19 aa, synthetic construct
PLNGAVNLYAQAQTQPVQN

SEQ ID NO: 707 - protein, 19 aa, synthetic construct
SLNGAVHLYAQAQTGLVQN

SEQ ID NO: 708 - protein, 19 aa, synthetic construct
PLDGSVHLYAQAQTGGVQN

SEQ ID NO: 709 - protein, 19 aa, synthetic construct
PLNGAVHLYDQAQTLPVQN

SEQ ID NO: 710 - protein, 19 aa, synthetic construct
PLNGAVHLYAQAQVSQVQK

SEQ ID NO: 711 - protein, 19 aa, synthetic construct
PLNGAVHLYAQAQLVGVQN

SEQ ID NO: 712 - protein, 19 aa, synthetic construct
PLNGAVHLYAQEQTSSVQN

SEQ ID NO: 713 - protein, 19 aa, synthetic construct
PLNGAVHIYAQAQTVAVQN

SEQ ID NO: 714 - protein, 19 aa, synthetic construct
PLNGAVNLYAQAQVTPVQN

SEQ ID NO: 715 - protein, 19 aa, synthetic construct
TLNGAVHLYAQAQTMSVQN

SEQ ID NO: 716 - protein, 19 aa, synthetic construct
TLNGAVHLYAQAQTLAVQN

SEQ ID NO: 717 - protein, 19 aa, synthetic construct
PINGAVHLYAQAQVAQVQN

SEQ ID NO: 718 - protein, 19 aa, synthetic construct
PLNGQVHLYAQAQTGWVQN

SEQ ID NO: 719 - protein, 19 aa, synthetic construct
QLNGAVHLYAQAQTGGVQN

SEQ ID NO: 720 - protein, 19 aa, synthetic construct
PLNGAVHLYAQAQTLSVKN

SEQ ID NO: 721 - protein, 19 aa, synthetic construct
PLNGTVHLYAQAQTGWDQN

SEQ ID NO: 722 - protein, 19 aa, synthetic construct
PLNGAVHLYAQAQTGWFQK

SEQ ID NO: 723 - protein, 19 aa, synthetic construct
ALNGAVHLYAQAQTSKVQN

SEQ ID NO: 724 - protein, 19 aa, synthetic construct
ALNGTVHLYAQAQTGWVQN

SEQ ID NO: 725 - protein, 19 aa, synthetic construct
PLNGAVPLYAQAQTGWVQH

SEQ ID NO: 726 - protein, 19 aa, synthetic construct
PLNGAVHLYAQAKTGWVQK

SEQ ID NO: 727 - protein, 19 aa, synthetic construct
PLNGAVHLYAQAQTPAVQN

SEQ ID NO: 728 - protein, 19 aa, synthetic construct
PLNGAVHLYAQAQTVGVKN

SEQ ID NO: 729 - protein, 19 aa, synthetic construct
PLNGAVHLYAQEQTGWFQN

SEQ ID NO: 730 - protein, 19 aa, synthetic construct
PLNGAVHLYAQAQKGWDQN

SEQ ID NO: 731 - protein, 19 aa, synthetic construct
PLNGAVHLYDQAQTSAVQN

SEQ ID NO: 732 - protein, 19 aa, synthetic construct
PLDGAVHLYAQAQTGWVQK

SEQ ID NO: 733 - protein, 19 aa, synthetic construct
PLNGAVHLYAQAQTAWVLN

SEQ ID NO: 734 - protein, 19 aa, synthetic construct
PLNGSVHLYAQAQTGWVLN

SEQ ID NO: 735 - protein, 19 aa, synthetic construct
QLNGAVHLYAQAQTGWVQT

SEQ ID NO: 736 - protein, 19 aa, synthetic construct
PLNGAVHLYAQAQVPPVQN

SEQ ID NO: 737 - protein, 19 aa, synthetic construct
PVNGAVHLYAQAQVQSVQN

SEQ ID NO: 738 - protein, 19 aa, synthetic construct
QLNGAVHLYAQAQTKSVQN

SEQ ID NO: 739 - protein, 19 aa, synthetic construct
PVNGAVHLYAQAQTSSVQN

SEQ ID NO: 740 - protein, 19 aa, synthetic construct
PLNGAVHLYAQAQATGVQN

SEQ ID NO: 741 - protein, 19 aa, synthetic construct
TLNGAVHLYAQAQLSQVQN

SEQ ID NO: 742 - protein, 19 aa, synthetic construct
PLDGAVHLYAQAQTVSVQN

SEQ ID NO: 743 - protein, 19 aa, synthetic construct
SLNGAVHLYAQAQTKPVQN

SEQ ID NO: 744 - protein, 19 aa, synthetic construct
PLKGAVHLYAQAQSAPVQN

SEQ ID NO: 745 - protein, 19 aa, synthetic construct
PLNGAVHLYAQAKTGWVKN

SEQ ID NO: 746 - protein, 19 aa, synthetic construct
PLNGSVHLYAQAQTLGVQN

SEQ ID NO: 747 - protein, 19 aa, synthetic construct
PLKGAVHLYAQAQLAPVQN

SEQ ID NO: 748 - protein, 19 aa, synthetic construct
PLNGSVHLYAQAQTGWVQK

SEQ ID NO: 749 - protein, 19 aa, synthetic construct
PLNGAVHLYAQAQTGGVQI

SEQ ID NO: 750 - protein, 19 aa, synthetic construct
PLNGAVHLYAQPQTGWVQT

SEQ ID NO: 751 - protein, 19 aa, synthetic construct
PLNGAVHLYAQAQTGWVLN

SEQ ID NO: 752 - protein, 19 aa, synthetic construct
PLNGAVHLYDQAQLTPVQN

SEQ ID NO: 753 - protein, 19 aa, synthetic construct
QLNGAVHLYAQAQTATVQN

SEQ ID NO: 754 - protein, 19 aa, synthetic construct
PLNGAVHLYAQAQTAWGQN

SEQ ID NO: 755 - protein, 19 aa, synthetic construct
PLNGAVHLYAQAQTGWVHN

SEQ ID NO: 756 - protein, 19 aa, synthetic construct
PLKGAVHLYAQAQSSPVQN

SEQ ID NO: 757 - protein, 19 aa, synthetic construct
PLNGAVHLYAQAQLGSVQT

SEQ ID NO: 758 - protein, 19 aa, synthetic construct
PLNGAVHLYAQAQSANVQN

SEQ ID NO: 759 - protein, 19 aa, synthetic construct
PLNGGVHLYAQAQTGSVQN

SEQ ID NO: 760 - protein, 19 aa, synthetic construct
PLNGAVHLYDQAQRSSVQN

SEQ ID NO: 761 - protein, 19 aa, synthetic construct
PLNGAVHLYAQAQTGGVQD

SEQ ID NO: 762 - protein, 19 aa, synthetic construct
PLNGAVHLYAQAQTMAVKN

SEQ ID NO: 763 - protein, 19 aa, synthetic construct
PLNGAVHLYAQAQTASVKN

SEQ ID NO: 764 - protein, 19 aa, synthetic construct
PLNGAVHLYAQAQSSPVQK

SEQ ID NO: 765 - protein, 19 aa, synthetic construct
PLNGAVHLYAQAQTGWVKN

SEQ ID NO: 766 - protein, 19 aa, synthetic construct
ALNGAVHLYAQAQTGGVQN

SEQ ID NO: 767 - protein, 19 aa, synthetic construct
PLNGAVHLYAQAQTGTVQT

SEQ ID NO: 768 - protein, 19 aa, synthetic construct
PLNGAVHLYAQAQTGWVQI

SEQ ID NO: 769 - protein, 19 aa, synthetic construct
PINGAVHLYAQAQTSLVQN

SEQ ID NO: 770 - protein, 19 aa, synthetic construct
PLNGAVHIYAQAQVAQVQN

SEQ ID NO: 771 - protein, 19 aa, synthetic construct
PLNGAVHLYAQAQTVWVKN

SEQ ID NO: 772 - protein, 19 aa, synthetic construct
TLNGAVHLYAQAQLMPVQN

SEQ ID NO: 773 - protein, 19 aa, synthetic construct
PLNGAVHIYAQAQTAPVQN

SEQ ID NO: 774 - protein, 19 aa, synthetic construct
PLYGAVHLYAQAQTASVQN

SEQ ID NO: 775 - protein, 19 aa, synthetic construct
TLNGAVHLYAQAQLGPVQN

SEQ ID NO: 776 - protein, 19 aa, synthetic construct
PLDGAVHLYAQAQTGWVKN

SEQ ID NO: 777 - protein, 19 aa, synthetic construct
PLKGAVHLYAQAQVSPVQN

SEQ ID NO: 778 - protein, 19 aa, synthetic construct
PLNGAVHLYAQAQSQQVQN

SEQ ID NO: 779 - protein, 19 aa, synthetic construct
PLNGAVDLYAQAQLSPVQN

SEQ ID NO: 780 - protein, 19 aa, synthetic construct
PLNGAVHLYAQAQVGSVQT

SEQ ID NO: 781 - protein, 19 aa, synthetic construct
PLNGTVHLYAQAQTGWAQN

SEQ ID NO: 782 - protein, 19 aa, synthetic construct
ALNGAVHLYAQAQTGLVQT

SEQ ID NO: 783 - protein, 19 aa, synthetic construct
PLNGAVHLYAQAQSSMVQN

SEQ ID NO: 784 - protein, 19 aa, synthetic construct
PLNGAVHLYAKAQTAGVQN

SEQ ID NO: 785 - protein, 19 aa, synthetic construct
PLNGAVHLYAHAQTGWVQK

SEQ ID NO: 786 - protein, 19 aa, synthetic construct
PLNGAVHLYAQAQTSPVQK

SEQ ID NO: 787 - protein, 19 aa, synthetic construct
PLNGAVHLYAQAQAVGVQN

SEQ ID NO: 788 - protein, 19 aa, synthetic construct
PLNGAVPLYAQAQTGWGQN

SEQ ID NO: 789 - protein, 19 aa, synthetic construct
PLNGTVHLYAQAQLGSVQN

SEQ ID NO: 790 - protein, 19 aa, synthetic construct
QLNGAVHLYAQAQTGWVQH

SEQ ID NO: 791 - protein, 19 aa, synthetic construct
PLNGSVHLYAQAQTGWVKN

SEQ ID NO: 792 - protein, 19 aa, synthetic construct
PLNGAVHLYDQAQVAPVQN

SEQ ID NO: 793 - protein, 19 aa, synthetic construct
PLNGAVNLYAQAQVSSVQN

SEQ ID NO: 794 - protein, 19 aa, synthetic construct
PLNGAVHLYAQAQTLPVQK

SEQ ID NO: 795 - protein, 19 aa, synthetic construct
PLNGSVHLYAQAQTASVQN

SEQ ID NO: 796 - protein, 19 aa, synthetic construct
ALNGAVHLYAQAQTGWGQN

SEQ ID NO: 797 - protein, 19 aa, synthetic construct
PLNGAVHLYAQAQTGWGQN

SEQ ID NO: 798 - protein, 19 aa, synthetic construct
PLNGAAHLYAQAQTSPVQN

SEQ ID NO: 799 - protein, 19 aa, synthetic construct
PLNGAVHLYAQAQTGRVQH

SEQ ID NO: 800 - protein, 19 aa, synthetic construct
PINGAVHLYAQAQTGWVQS

SEQ ID NO: 801 - protein, 19 aa, synthetic construct
PLNGAVHLYAQAQTPSVQN

SEQ ID NO: 802 - protein, 19 aa, synthetic construct
PLNGAVHLYDQAQTTAVQN

SEQ ID NO: 803 - protein, 19 aa, synthetic construct
PLNGNVHLYAQAQTGWVQK

SEQ ID NO: 804 - protein, 19 aa, synthetic construct
PLNGAVHLYAQAQTGWVEN

SEQ ID NO: 805 - protein, 19 aa, synthetic construct
PLNGAVNLYAQAQTTPVQN

SEQ ID NO: 806 - protein, 19 aa, synthetic construct
PLNGAVNLYAQAQLSQVQN

SEQ ID NO: 807 - protein, 19 aa, synthetic construct
SLNGAVHLYAQAQVMSVQN

SEQ ID NO: 808 - protein, 19 aa, synthetic construct
QLNGAVHLYAQAQTGWVQS

SEQ ID NO: 809 - protein, 19 aa, synthetic construct
PINGAVHLYAQAQTGWFQN

SEQ ID NO: 810 - protein, 19 aa, synthetic construct
PLNGDVHLYAQAQVSSVQN

SEQ ID NO: 811 - protein, 19 aa, synthetic construct
PLNGGVHLYAQAQTGWVQS

SEQ ID NO: 812 - protein, 19 aa, synthetic construct
PLNGAVNLYAQAQRSTVQN

SEQ ID NO: 813 - protein, 19 aa, synthetic construct
ALNGAVHLYAQAQTGWVQY

SEQ ID NO: 814 - protein, 19 aa, synthetic construct
PLNGAVHHYAQAQTAAVQN

SEQ ID NO: 815 - protein, 19 aa, synthetic construct
PLNGAVHRYAQAQTGWVQH

SEQ ID NO: 816 - protein, 19 aa, synthetic construct
QLNGAVHLYAQAQTGWVHN

SEQ ID NO: 817 - protein, 19 aa, synthetic construct
PLNGAVHLYAQAQRGWVQN

SEQ ID NO: 818 - protein, 19 aa, synthetic construct
PLNGAVHLYAQAQTGSVEN

SEQ ID NO: 819 - protein, 19 aa, synthetic construct
ALNGAVHLYAQAQTGWVHN

SEQ ID NO: 820 - protein, 19 aa, synthetic construct
PLNGAVNLYAQAQTLAVQN

SEQ ID NO: 821 - protein, 19 aa, synthetic construct
PLNGAVHLYAQAQSSLVQN

SEQ ID NO: 822 - protein, 19 aa, synthetic construct
ALNGAVHLYAQAQTGWLQN

SEQ ID NO: 823 - protein, 19 aa, synthetic construct
TLNGAVHLYAQAQTLQVQN

SEQ ID NO: 824 - protein, 19 aa, synthetic construct
PLNGAVHLYDQAQVQSVQN

SEQ ID NO: 825 - protein, 19 aa, synthetic construct
SLNGAVHLYAQAQVTGVQN

SEQ ID NO: 826 - protein, 19 aa, synthetic construct
QLNGAVHLYAQAQSAVVQN

SEQ ID NO: 827 - protein, 19 aa, synthetic construct
PLNGVVHLYAQAQTGWVQT

SEQ ID NO: 828 - protein, 19 aa, synthetic construct
PLNGAVHLYAQAQTAWVKN

SEQ ID NO: 829 - protein, 19 aa, synthetic construct
TLNGAVHLYAQAQTLPVQN

SEQ ID NO: 830 - protein, 19 aa, synthetic construct
ALNGAVHLYAQAQTTGVQN

SEQ ID NO: 831 - protein, 19 aa, synthetic construct
PLNGAVHLYAKAQTMAVQN

SEQ ID NO: 832 - protein, 19 aa, synthetic construct
PLNGAVHLYAQAQTYSVQN

SEQ ID NO: 833 - protein, 19 aa, synthetic construct
PLNGCVHLYAQAQTGWVQN

SEQ ID NO: 834 - protein, 19 aa, synthetic construct
PLNGAVHLYAQAQLAAVQT

SEQ ID NO: 835 - protein, 19 aa, synthetic construct
PLNGAVHLYAQAQTALVKN

SEQ ID NO: 836 - protein, 19 aa, synthetic construct
PLNGAVHLYAKAQTVAVQN

SEQ ID NO: 837 - protein, 19 aa, synthetic construct
PLNGAVHLYAHAQTGWVQT

SEQ ID NO: 838 - protein, 19 aa, synthetic construct
PLNGGVHLYAQAQRGSVQN

SEQ ID NO: 839 - protein, 19 aa, synthetic construct
PLNGAFHLYAQAQTGGVQN

SEQ ID NO: 840 - protein, 19 aa, synthetic construct
PLNGAVHLYALAQTSPVQN

SEQ ID NO: 841 - protein, 19 aa, synthetic construct
PLNGAVHLYAQAQTGWVQY

SEQ ID NO: 842 - protein, 19 aa, synthetic construct
PLNGAVHLYAQAQTLPVQT

SEQ ID NO: 843 - protein, 19 aa, synthetic construct
PLNGAVHLYSQAQTGWFQN

SEQ ID NO: 844 - protein, 19 aa, synthetic construct
PLNGAVHLYAQAQTGLVQH

SEQ ID NO: 845 - protein, 19 aa, synthetic construct
PLNGAVHLYAQAQTPTVQN

SEQ ID NO: 846 - protein, 19 aa, synthetic construct
PLYGAVHLYAQAQTAWVQN

SEQ ID NO: 847 - protein, 19 aa, synthetic construct
PLNGAVHLYAKAQTASVQN

SEQ ID NO: 848 - protein, 19 aa, synthetic construct
PLNGAVHLYAQAQTASVQK

SEQ ID NO: 849 - protein, 19 aa, synthetic construct
PLDGSVHLYAQAQTAWVQN

SEQ ID NO: 850 - protein, 19 aa, synthetic construct
PLNGADHLYAQAQTSSVQN

SEQ ID NO: 851 - protein, 19 aa, synthetic construct
PLNGAVHLYAQAQTSPVQI

SEQ ID NO: 852 - protein, 19 aa, synthetic construct
PLNGAVHLYAQAQIGWVQN

SEQ ID NO: 853 - protein, 19 aa, synthetic construct
PLNGAVHLYAKAQTSTVQN

SEQ ID NO: 854 - protein, 19 aa, synthetic construct
PLNGAVHRYAQAQTGWVQT

SEQ ID NO: 855 - protein, 19 aa, synthetic construct
PLNGAVHLYDQAQTSTVQN

SEQ ID NO: 856 - protein, 19 aa, synthetic construct
QLNGAVHLYAQAQTGLVQN

SEQ ID NO: 857 - protein, 19 aa, synthetic construct
PLNGAVNLYAQAQLGPVQN

SEQ ID NO: 858 - protein, 19 aa, synthetic construct
PLNGAVHLYAQAQTGWDKN

SEQ ID NO: 859 - protein, 19 aa, synthetic construct
PLNGALHLYAQAQTGWVKN

SEQ ID NO: 860 - protein, 19 aa, synthetic construct
PLNGNVHLYAHAQTGWVQN

SEQ ID NO: 861 - protein, 19 aa, synthetic construct
PLNGAVHLYAQAQKSSVQN

SEQ ID NO: 862 - protein, 19 aa, synthetic construct
PLNGAVHLYAQAQTGYVQN

SEQ ID NO: 863 - protein, 19 aa, synthetic construct
PVNGAVHLYAQAQVGSVQN

SEQ ID NO: 864 - protein, 19 aa, synthetic construct
PLNGGVHLYAQAQTGWVKN

SEQ ID NO: 865 - protein, 19 aa, synthetic construct
PLNGAVHLYAQAQRGWVQT

SEQ ID NO: 866 - protein, 19 aa, synthetic construct
PLNGAVNLYAQAQRSLVQN

SEQ ID NO: 867 - protein, 19 aa, synthetic construct
PINGAVHLYAQAQTGWDQN

SEQ ID NO: 868 - protein, 19 aa, synthetic construct
PLNGNVHLYAQAQTGWVQT

SEQ ID NO: 869 - protein, 19 aa, synthetic construct
PLNGAVHLYAKAQTGWFQN

SEQ ID NO: 870 - protein, 19 aa, synthetic construct
PLNGAVHLYAQEQTSTVQN

SEQ ID NO: 871 - protein, 19 aa, synthetic construct
PLNGAVHLYAQAQTGGVEN

SEQ ID NO: 872 - protein, 19 aa, synthetic construct
PLNGAVHLYSQAQTGWVQI

SEQ ID NO: 873 - protein, 19 aa, synthetic construct
SLNGAVHLYAQAQTGLVQK

SEQ ID NO: 874 - protein, 19 aa, synthetic construct
PLNGAVHLYAQAQTGCVRN

SEQ ID NO: 875 - protein, 19 aa, synthetic construct
PLNGADHLYAQAQVTPVQN

SEQ ID NO: 876 - protein, 19 aa, synthetic construct
PLNGAVHLYAPAQTGWVQT

SEQ ID NO: 877 - protein, 19 aa, synthetic construct
PLNGDVHLYAQAQTSAVQN

SEQ ID NO: 878 - protein, 19 aa, synthetic construct
TLNGAVHLYAQAQSSLVQN

SEQ ID NO: 879 - protein, 19 aa, synthetic construct
SLNGAVHLYAQAQRSVVQN

SEQ ID NO: 880 - protein, 19 aa, synthetic construct
SLNGAVHLYAQAQTGWVQS

SEQ ID NO: 881 - protein, 19 aa, synthetic construct
PVNGAVHLYAQAQTGWVQS

SEQ ID NO: 882 - protein, 19 aa, synthetic construct
PLNGAVHLYAQAQLSPVQS

SEQ ID NO: 883 - protein, 19 aa, synthetic construct
PLNGAVHLYAQPQTGWLQN

SEQ ID NO: 884 - protein, 19 aa, synthetic construct
PLNGAVNLYAQAQSAPVQN

SEQ ID NO: 885 - protein, 19 aa, synthetic construct
PLNGTVHLYAQAQTGWVPN

SEQ ID NO: 886 - protein, 19 aa, synthetic construct
PVDGAVHLYAQAQTGSVQN

SEQ ID NO: 887 - protein, 19 aa, synthetic construct
PLNGAVHLYDQAQTAAVQN

SEQ ID NO: 888 - protein, 19 aa, synthetic construct
PLKGAVHLYAQAQTSTVQN

SEQ ID NO: 889 - protein, 19 aa, synthetic construct
PLNGAVHLYAQAQTGPVQT

SEQ ID NO: 890 - protein, 19 aa, synthetic construct
PLNGAVHLYAQAQTVGVQK

SEQ ID NO: 891 - protein, 19 aa, synthetic construct
PLNGAVNLYAQAQTSTVQN

SEQ ID NO: 892 - protein, 19 aa, synthetic construct
PLNGAVHLYARAQTVSVQN

SEQ ID NO: 893 - protein, 19 aa, synthetic construct
PLNGAVHLYAQAQTASGQN

SEQ ID NO: 894 - protein, 19 aa, synthetic construct
PLNGAVHLYAQAQSVSVQN

SEQ ID NO: 895 - protein, 19 aa, synthetic construct
PLNGAVHLYAQAQSGPVQT

SEQ ID NO: 896 - protein, 19 aa, synthetic construct
QLNGAVHLYAQAQTGWGQN

SEQ ID NO: 897 - protein, 19 aa, synthetic construct
PLNGAVHLYAQAQVMSVKN

SEQ ID NO: 898 - protein, 19 aa, synthetic construct
PLNGTVHLYAKAQTGSVQN

SEQ ID NO: 899 - protein, 19 aa, synthetic construct
PLNGAVNLYAQAQTSLVQN

SEQ ID NO: 900 - protein, 19 aa, synthetic construct
PINGAVHLYAQAQTLSVQN

SEQ ID NO: 901 - protein, 19 aa, synthetic construct
PLNGAVHLYAQAQLGSVQK

SEQ ID NO: 902 - protein, 19 aa, synthetic construct
TLNGAVHLYAQAQTAMVQN

SEQ ID NO: 903 - protein, 19 aa, synthetic construct
PLNGAVHLYAQAHLSSVQN

SEQ ID NO: 904 - protein, 19 aa, synthetic construct
PLNGAVHLYAKAQVMSVQN

SEQ ID NO: 905 - protein, 19 aa, synthetic construct
PLNGAVHLYAQAQTGLVLN

SEQ ID NO: 906 - protein, 19 aa, synthetic construct
PLNGGVHLYAQAQTGWVQK

SEQ ID NO: 907 - protein, 19 aa, synthetic construct
PLNGAVHLYAKAQTGWVQK

SEQ ID NO: 908 - protein, 19 aa, synthetic construct
PLNGAVLLYAQAQTASVQN

SEQ ID NO: 909 - protein, 19 aa, synthetic construct
PLNGDVHLYAQAQTMAVQN

SEQ ID NO: 910 - protein, 19 aa, synthetic construct
PLNGAVHLYAKAQTAAVQN

SEQ ID NO: 911 - protein, 19 aa, synthetic construct
PLNGAVHLYAQAQTGLVQN

SEQ ID NO: 912 - protein, 19 aa, synthetic construct
PLNGDVHLYAQAQSSPVQN

SEQ ID NO: 913 - protein, 19 aa, synthetic construct
PLNGAVHLYAQAQTSNVQN

SEQ ID NO: 914 - protein, 19 aa, synthetic construct
ALDGAVHLYAQAQTGSVQN

SEQ ID NO: 915 - protein, 19 aa, synthetic construct
PLNGAVHLYSQAQTSSVQN

SEQ ID NO: 916 - protein, 19 aa, synthetic construct
PLKGAVHLYAQAQLSPVQN

SEQ ID NO: 917 - protein, 19 aa, synthetic construct
LLNGAVHLYAQAQTVSVQN

SEQ ID NO: 918 - protein, 19 aa, synthetic construct
PLNGGVHLYAQAQTGWVQI

SEQ ID NO: 919 - protein, 19 aa, synthetic construct
PLNGAVHLYSQAQTGWVRN

SEQ ID NO: 920 - protein, 19 aa, synthetic construct
PLNGAVHLYAQAQTGWGHN

SEQ ID NO: 921 - protein, 19 aa, synthetic construct
PHNGAVHLYAQAQTTSVQN

SEQ ID NO: 922 - protein, 19 aa, synthetic construct
PLNRAVHLYAQAQTGWVQK

SEQ ID NO: 923 - protein, 19 aa, synthetic construct
PLNGAVHLYDQAQRASVQN

SEQ ID NO: 924 - protein, 19 aa, synthetic construct
PLNGAVHLYSQAQTGWVQN

SEQ ID NO: 925 - protein, 19 aa, synthetic construct
PLNGSVHLYAQAQTGTVQN

SEQ ID NO: 926 - protein, 19 aa, synthetic construct
PLNGAVHLYDQAQTSGVQN

SEQ ID NO: 927 - protein, 19 aa, synthetic construct
PLNGAVHLYAQAKTGWFQN

SEQ ID NO: 928 - protein, 19 aa, synthetic construct
KLDGAVHLYAQAQTGLVQN

SEQ ID NO: 929 - protein, 19 aa, synthetic construct
PLNGAVHLYAQAQSQMVQN

SEQ ID NO: 930 - protein, 19 aa, synthetic construct
TLNGAVHLYAQAQTSVVQN

SEQ ID NO: 931 - protein, 19 aa, synthetic construct
PLNGAVHLYAKAQTGTVQN

SEQ ID NO: 932 - protein, 19 aa, synthetic construct
PLNGAVHLYAQAQTVSVHN

SEQ ID NO: 933 - protein, 19 aa, synthetic construct
PLNGAVHLYAQAQLSSVQT

SEQ ID NO: 934 - protein, 19 aa, synthetic construct
PVNGAVHLYAQAQTGWFQN

SEQ ID NO: 935 - protein, 19 aa, synthetic construct
PLNGAVHLYAQAQTASVRN

SEQ ID NO: 936 - protein, 19 aa, synthetic construct
PLNGDVHLYAQAQTSTVQN

SEQ ID NO: 937 - protein, 19 aa, synthetic construct
PLNGAVHLYAKAQLGSVQN

SEQ ID NO: 938 - protein, 19 aa, synthetic construct
PINGAVHLYAQAQLVPVQN

SEQ ID NO: 939 - protein, 19 aa, synthetic construct
PLNGAVHHYAQAQLGPVQN

SEQ ID NO: 940 - protein, 19 aa, synthetic construct
PLNGAVHLYAPAQTGWVQH

SEQ ID NO: 941 - protein, 19 aa, synthetic construct
PLNGAVHLYAQAQVPAVQN

SEQ ID NO: 942 - protein, 19 aa, synthetic construct
PLNGAVNLYAQAQRLSVQN

SEQ ID NO: 943 - protein, 19 aa, synthetic construct
PLNGAVHLYAQAQTGRVQK

SEQ ID NO: 944 - protein, 19 aa, synthetic construct
PLNGAVLLYAQAQTVSVQN

SEQ ID NO: 945 - protein, 19 aa, synthetic construct
PLNGAVHLYAQAQAMSVQN

SEQ ID NO: 946 - protein, 19 aa, synthetic construct
PLNGAVHLYAQAQTAWVHN

SEQ ID NO: 947 - protein, 19 aa, synthetic construct
PLNGAVHLYAQPQTGWVRN

SEQ ID NO: 948 - protein, 19 aa, synthetic construct
PLNGAVHLYAQEQTGWLQN

SEQ ID NO: 949 - protein, 19 aa, synthetic construct
PLNGAVHLYAKAQTSAVQN

SEQ ID NO: 950 - protein, 19 aa, synthetic construct
PLNGSVHLYAQAQTVWVQN

SEQ ID NO: 951 - protein, 19 aa, synthetic construct
PLNGTVHLYAQAQTGWFQN

SEQ ID NO: 952 - protein, 19 aa, synthetic construct
PLNGAVNLYAQAQVASVQN

SEQ ID NO: 953 - protein, 19 aa, synthetic construct
PLNGAVHLYAQAQTGLVRN

SEQ ID NO: 954 - protein, 19 aa, synthetic construct
PLNGAVNLYAQAQLSTVQN

SEQ ID NO: 955 - protein, 19 aa, synthetic construct
PLNGAVHLYAKAQTQPVQN

SEQ ID NO: 956 - protein, 19 aa, synthetic construct
PLNGTVHLYAQAQTGWGQN

SEQ ID NO: 957 - protein, 19 aa, synthetic construct
PLNGAVHLYAQAQRTLVQT

SEQ ID NO: 958 - protein, 19 aa, synthetic construct
PLNGAVHLYAQAQTGSIQN

SEQ ID NO: 959 - protein, 19 aa, synthetic construct
QLNGAVHLYAQAQTGWDQN

SEQ ID NO: 960 - protein, 19 aa, synthetic construct
PLNGAVHLYAQAQLSSVKN

SEQ ID NO: 961 - protein, 19 aa, synthetic construct
QLNGAVHLYAQAQTVSVQN

SEQ ID NO: 962 - protein, 19 aa, synthetic construct
PLNGAVHLYAQAQTLQVQK

SEQ ID NO: 963 - protein, 19 aa, synthetic construct
TLNGAVHLYAQAQVLPVQN

SEQ ID NO: 964 - protein, 19 aa, synthetic construct
PLNGAVHLYAQAQVGSVKN

SEQ ID NO: 965 - protein, 19 aa, synthetic construct
PLNGAVHLYAQAQLAPLQN

SEQ ID NO: 966 - protein, 19 aa, synthetic construct
QLNGAVHLYAQAQTGSVKN

SEQ ID NO: 967 - protein, 19 aa, synthetic construct
PLNGAVHHYAQAQRSTVQN

SEQ ID NO: 968 - protein, 19 aa, synthetic construct
QLNGSVHLYAQAQTGRVQN

SEQ ID NO: 969 - protein, 19 aa, synthetic construct
TLNGAVHLYAQAQVKPVQN

SEQ ID NO: 970 - protein, 19 aa, synthetic construct
PLNGTVHLYAQAQTGLVQN

SEQ ID NO: 971 - protein, 19 aa, synthetic construct
PLNGAVHLYAQAQTPGVQN

SEQ ID NO: 972 - protein, 19 aa, synthetic construct
PINGAVHLYAQAQTSSVQN

SEQ ID NO: 973 - protein, 19 aa, synthetic construct
PLNGAVHLYAQAQLSAVQT

SEQ ID NO: 974 - protein, 19 aa, synthetic construct
PLNGAVHLYSQAQTGWDQN

SEQ ID NO: 975 - protein, 19 aa, synthetic construct
PLNCAVHLYAQAQTGWVQN

SEQ ID NO: 976 - protein, 19 aa, synthetic construct
PLNGAVNLYAQAQTMPVQN

SEQ ID NO: 977 - protein, 19 aa, synthetic construct
PLNGAVHLYSQAQTVAVQN

SEQ ID NO: 978 - protein, 19 aa, synthetic construct
PLNGTVHLYAQAQTGWVKN

SEQ ID NO: 979 - protein, 19 aa, synthetic construct
PLNGGVHLYAQAQTGWVHN

SEQ ID NO: 980 - protein, 19 aa, synthetic construct
QLNGAVHLYAQAQTGWVQK

SEQ ID NO: 981 - protein, 19 aa, synthetic construct
PLNGAVQLYAQAQTLAVQN

SEQ ID NO: 982 - protein, 19 aa, synthetic construct
PLNGTVHLYAQAQVGSVQN

SEQ ID NO: 983 - protein, 19 aa, synthetic construct
PLNGGVHLYAQAQTGGVQN

SEQ ID NO: 984 - protein, 19 aa, synthetic construct
PLKGAVHLYAQAQVSQVQN

SEQ ID NO: 985 - protein, 19 aa, synthetic construct
PLNGAVHHYAQAQTQPVQN

SEQ ID NO: 986 - protein, 19 aa, synthetic construct
PLNGAVHLYAQAPTGWVQT

SEQ ID NO: 987 - protein, 19 aa, synthetic construct
PLNGAVNLYAQAQTMSVQN

SEQ ID NO: 988 - protein, 19 aa, synthetic construct
PLNGAVHLYAQAQTGVVQN

SEQ ID NO: 989 - protein, 19 aa, synthetic construct
PLNGAVHLYAQAQVPQVQN

SEQ ID NO: 990 - protein, 19 aa, synthetic construct
PHNGAVHLYAQAQTMSVQN

SEQ ID NO: 991 - protein, 19 aa, synthetic construct
QLNGAVHLYAQAQTGWLQN

SEQ ID NO: 992 - protein, 19 aa, synthetic construct
PLNGAVHLYAQAQTGCVQK

SEQ ID NO: 993 - protein, 19 aa, synthetic construct
SLNGAVHLYAQAQTSLVQN

SEQ ID NO: 994 - protein, 19 aa, synthetic construct
PLNGAVHLYAQAQTRWVQT

SEQ ID NO: 995 - protein, 19 aa, synthetic construct
TLNGAVHLYAQAQTVQVQN

SEQ ID NO: 996 - protein, 19 aa, synthetic construct
ALNGAVHLYAQAQKGGVQN

SEQ ID NO: 997 - protein, 19 aa, synthetic construct
PLNGAVHLYDQAQVSGVQN

SEQ ID NO: 998 - protein, 19 aa, synthetic construct
PLNGAVHLYAQAQTGLDQN

SEQ ID NO: 999 - protein, 19 aa, synthetic construct
PLNGAVPLYAQAQTGWVQT

SEQ ID NO: 1000 - protein, 19 aa, synthetic construct
PLNGAVHLYAQAQVSSVHN

SEQ ID NO: 1001 - protein, 19 aa, synthetic construct
TLNGAVHLYAQAQTNSVQN

SEQ ID NO: 1002 - protein, 19 aa, synthetic construct
PLNGAGHLYAQAQLSPVQN

SEQ ID NO: 1003 - protein, 19 aa, synthetic construct
HLNGAVHLYAQAQTGRVQN

SEQ ID NO: 1004 - protein, 19 aa, synthetic construct
PLNGAVHLYDQAQTAMVQN

SEQ ID NO: 1005 - protein, 19 aa, synthetic construct
PINGAVHLYAQAQTGWVQH

SEQ ID NO: 1006 - protein, 19 aa, synthetic construct
PLNGAVQLYAQAQTLQVQN

SEQ ID NO: 1007 - protein, 19 aa, synthetic construct
PLNGAVHLYAQAQKGWVQT

SEQ ID NO: 1008 - protein, 19 aa, synthetic construct
PLNGAVHHYAQAQSTSVQN

SEQ ID NO: 1009 - protein, 19 aa, synthetic construct
PLNGYVHLYAQAQTGWVQN

SEQ ID NO: 1010 - protein, 19 aa, synthetic construct
PLNGAVHIYAQAQVQSVQN

SEQ ID NO: 1011 - protein, 19 aa, synthetic construct
PLIGAVHLYAQAQLSPVQN

SEQ ID NO: 1012 - protein, 19 aa, synthetic construct
TLNGAVHLYAQAQLLPVQN

SEQ ID NO: 1013 - protein, 19 aa, synthetic construct
PLNGAVHLYSQAQTGWVQT

SEQ ID NO: 1014 - protein, 19 aa, synthetic construct
ALNGAVHLYAQAQTQLVQN

SEQ ID NO: 1015 - protein, 19 aa, synthetic construct
PLNGAVHLYAQAQSLPVQN

SEQ ID NO: 1016 - protein, 19 aa, synthetic construct
PVNGAVHLYAQAQTGWVPN

SEQ ID NO: 1017 - protein, 19 aa, synthetic construct
PLNGAVHLYAQAKTVSVQN

SEQ ID NO: 1018 - protein, 19 aa, synthetic construct
PLNGAVHLYAQAQTTSVHN

SEQ ID NO: 1019 - protein, 19 aa, synthetic construct
PVNGAVHLYAQAQTGWVQN

SEQ ID NO: 1020 - protein, 19 aa, synthetic construct
PLNGAVHLYAQAHTGWVQI

SEQ ID NO: 1021 - protein, 19 aa, synthetic construct
PLNGAVRLYAQAQTASVQN

SEQ ID NO: 1022 - protein, 19 aa, synthetic construct
PLNGGVHLYAQAQTGLVQK

SEQ ID NO: 1023 - protein, 19 aa, synthetic construct
PLNGAVNLYAQAQVMSVQN

SEQ ID NO: 1024 - protein, 19 aa, synthetic construct
PLNGAVNLYAQAQSMSVQN

SEQ ID NO: 1025 - protein, 19 aa, synthetic construct
PLNGAVHLYAPAQTGWGQN

SEQ ID NO: 1026 - protein, 19 aa, synthetic construct
QLNGAVHLYAQAQTGWAQN

SEQ ID NO: 1027 - protein, 19 aa, synthetic construct
PLNGAVHLYAQAQTVWVQN

SEQ ID NO: 1028 - protein, 19 aa, synthetic construct
QLNGAVHLYAQAQSVSVQN

SEQ ID NO: 1029 - protein, 19 aa, synthetic construct
PLNGAVHLYAQAQTAQLQN

SEQ ID NO: 1030 - protein, 19 aa, synthetic construct
PLNGAVHLYAQAHVASVQN

SEQ ID NO: 1031 - protein, 19 aa, synthetic construct
PLNGAVHLYAKAQRSTVQN

SEQ ID NO: 1032 - protein, 19 aa, synthetic construct
QLNGAVHLYAQAQTGWVKN

SEQ ID NO: 1033 - protein, 19 aa, synthetic construct
PLNGAVHLYAQAQTRWVKN

SEQ ID NO: 1034 - protein, 19 aa, synthetic construct
PLNGAVHLYAQAQTAWIQN

SEQ ID NO: 1035 - protein, 19 aa, synthetic construct
PLNGAVHLYAQAQLSQVKN

SEQ ID NO: 1036 - protein, 19 aa, synthetic construct
SLNGAVHLYAQAQTGWVQN

SEQ ID NO: 1037 - protein, 19 aa, synthetic construct
PLNGAVHLYAQAQTSTVKN

SEQ ID NO: 1038 - protein, 19 aa, synthetic construct
PLNGAVHLYAQAQALPVQN

SEQ ID NO: 1039 - protein, 19 aa, synthetic construct
PLNGAVHLYDQAQTGWFQN

SEQ ID NO: 1040 - protein, 19 aa, synthetic construct
PLNGAVHVYAQAQTGWFQN

SEQ ID NO: 1041 - protein, 19 aa, synthetic construct
PINGAVHLYAQAQVGSVQN

SEQ ID NO: 1042 - protein, 19 aa, synthetic construct
PLNGSVHLYAQAQTTGVQN

SEQ ID NO: 1043 - protein, 19 aa, synthetic construct
PLNGAVHLYAKAQASPVQN

SEQ ID NO: 1044 - protein, 19 aa, synthetic construct
PLNGSVHLYAQAQKAWVQN

SEQ ID NO: 1045 - protein, 19 aa, synthetic construct
SLNGAVHLYAQAQVLGVQN

SEQ ID NO: 1046 - protein, 19 aa, synthetic construct
PLNGAVHLYAQEQLMPVQN

SEQ ID NO: 1047 - protein, 19 aa, synthetic construct
ALNGAVHLYAQSQTGWVQN

SEQ ID NO: 1048 - protein, 19 aa, synthetic construct
PLNGYVHLYDQAQTGWVQN

SEQ ID NO: 1049 - protein, 19 aa, synthetic construct
PLNGAVHLYAQAQTSMVQT

SEQ ID NO: 1050 - protein, 19 aa, synthetic construct
QLNGAVHLYAQAQISSVQN

SEQ ID NO: 1051 - protein, 19 aa, synthetic construct
PVNGAVHLYAQAQTGWVQT

SEQ ID NO: 1052 - protein, 19 aa, synthetic construct
PLNGAVHLYAQEQTATVQN

SEQ ID NO: 1053 - protein, 19 aa, synthetic construct
PLNGAVYLYAQAQTVSVQN

SEQ ID NO: 1054 - protein, 19 aa, synthetic construct
PLNGNVHLYAQAQTASVQN

SEQ ID NO: 1055 - protein, 19 aa, synthetic construct
PLNGYVHLYAQAQTGLVQN

SEQ ID NO: 1056 - protein, 19 aa, synthetic construct
PLNGAVHLYDQAQTLSVQN

SEQ ID NO: 1057 - protein, 19 aa, synthetic construct
PLNGAVHLYAQAQTSSVQH

SEQ ID NO: 1058 - protein, 19 aa, synthetic construct
SLNGAVHLYAQAQTGWVPN

SEQ ID NO: 1059 - protein, 19 aa, synthetic construct
PLNGAVHLYAQAQTAMVKN

SEQ ID NO: 1060 - protein, 19 aa, synthetic construct
TLNGAVHLYAQAQRLSVQN

SEQ ID NO: 1061 - protein, 19 aa, synthetic construct
ALNGAVHLYAQAQTGWVQK

SEQ ID NO: 1062 - protein, 19 aa, synthetic construct
PLNGAVHLYAKAQTALVQN

SEQ ID NO: 1063 - protein, 19 aa, synthetic construct
QLNGAVHLYAQAQTAKVQN

SEQ ID NO: 1064 - protein, 19 aa, synthetic construct
PLNGADHLYAQAQTTSVQN

SEQ ID NO: 1065 - protein, 19 aa, synthetic construct
PLNGAVHLYAQAQTPWVQN

SEQ ID NO: 1066 - protein, 19 aa, synthetic construct
PLNGTVHLYAQAQTGWIQN

SEQ ID NO: 1067 - protein, 19 aa, synthetic construct
PLNGAVHLYAQAHTGWVQH

SEQ ID NO: 1068 - protein, 19 aa, synthetic construct
PLNGAVHLYARAQTASVQN

SEQ ID NO: 1069 - protein, 19 aa, synthetic construct
TLNGAVHLYAQAQRSLVQN

SEQ ID NO: 1070 - protein, 19 aa, synthetic construct
PLNGAVHLYAQAHTGWVQK

SEQ ID NO: 1071 - protein, 19 aa, synthetic construct
PLNGDVHLYAQAQTAQVQN

SEQ ID NO: 1072 - protein, 19 aa, synthetic construct
TLNGAVHLYAQAQTQPVQN

SEQ ID NO: 1073 - protein, 19 aa, synthetic construct
PLNGAVHLYAQAQTPRVQN

SEQ ID NO: 1074 - protein, 19 aa, synthetic construct
PRNGAVHLYAQAQTMSVQN

SEQ ID NO: 1075 - protein, 19 aa, synthetic construct
PLNGAVHLYAQAHTVSVQN

SEQ ID NO: 1076 - protein, 19 aa, synthetic construct
PVNGAVHLYAQAQTGLVQT

SEQ ID NO: 1077 - protein, 19 aa, synthetic construct
PLNGAVHLYAQAQSSSVQN

SEQ ID NO: 1078 - protein, 19 aa, synthetic construct
PLNGAVHLYAQAQRPPVQN

SEQ ID NO: 1079 - protein, 19 aa, synthetic construct
PLNGAVHLYTQAQVSPVQN

SEQ ID NO: 1080 - protein, 19 aa, synthetic construct
PLNGAVPLYAQAQTTPVQN

SEQ ID NO: 1081 - protein, 19 aa, synthetic construct
ALNGAVHLYAQAQTGWVKN

SEQ ID NO: 1082 - protein, 19 aa, synthetic construct
SLNGAVHLYAQAQTGWVRN

SEQ ID NO: 1083 - protein, 19 aa, synthetic construct
PLNGAVHLYAQAQLAGVKN

SEQ ID NO: 1084 - protein, 19 aa, synthetic construct
PLNGAVHLYAQAQTSPAQN

SEQ ID NO: 1085 - protein, 19 aa, synthetic construct
PLNGAVHLYAKAQLSSVQN

SEQ ID NO: 1086 - protein, 19 aa, synthetic construct
PLNGAVHLYAQAQRSPVQT

SEQ ID NO: 1087 - protein, 19 aa, synthetic construct
PLNGAVHLYAHAQTMSVQN

SEQ ID NO: 1088 - protein, 19 aa, synthetic construct
PLNGNVHLYAQAQTGWVKN

SEQ ID NO: 1089 - protein, 19 aa, synthetic construct
PLNGAVHLYAQAQTGWVPH

SEQ ID NO: 1090 - protein, 19 aa, synthetic construct
PLNGAVHLYAQAQPGWGQN

SEQ ID NO: 1091 - protein, 19 aa, synthetic construct
PLNGVVHLYAQAQTVSVQN

SEQ ID NO: 1092 - protein, 19 aa, synthetic construct
PLNGDVHLYAQAQTSSVQN

SEQ ID NO: 1093 - protein, 19 aa, synthetic construct
PLNGAVHIYAQAQTLSVQN

SEQ ID NO: 1094 - protein, 19 aa, synthetic construct
PLNGAVHLYAQAQIPPVQN

SEQ ID NO: 1095 - protein, 19 aa, synthetic construct
SLNGAVHLYAQAQTGWVQH

SEQ ID NO: 1096 - protein, 19 aa, synthetic construct
PLNAAVHLYAQAQTGWDQN

SEQ ID NO: 1097 - protein, 19 aa, synthetic construct
PLNGAVHRYAQAQTTSVQN

SEQ ID NO: 1098 - protein, 19 aa, synthetic construct
PLNGSVHLYAQAQPGSVQN

SEQ ID NO: 1099 - protein, 19 aa, synthetic construct
PLDGAVHLYAQAQTGWVEN

SEQ ID NO: 1100 - protein, 19 aa, synthetic construct
PLNGAVHLYAQAQTGRVKN

SEQ ID NO: 1101 - protein, 19 aa, synthetic construct
PLNGAVHLYAQAQTGRLQN

SEQ ID NO: 1102 - protein, 19 aa, synthetic construct
PLNGSVHLYAQAQTARVQN

SEQ ID NO: 1103 - protein, 19 aa, synthetic construct
PLNGAVHLYDQAQLSSVQN

SEQ ID NO: 1104 - protein, 19 aa, synthetic construct
ALNGAVHLYAQAQTRLVQN

SEQ ID NO: 1105 - protein, 19 aa, synthetic construct
PLNGAVNLYAQAQTAQVQN

SEQ ID NO: 1106 - protein, 19 aa, synthetic construct
PLNGAVHLYAQAQLSSVQH

SEQ ID NO: 1107 - protein, 19 aa, synthetic construct
PLNGAVHLYAQAHTGPVQN

SEQ ID NO: 1108 - protein, 19 aa, synthetic construct
PLKGAVHLYAQAQTLSVQN

SEQ ID NO: 1109 - protein, 19 aa, synthetic construct
ALNGAVHLYAQAQKAWVQN

SEQ ID NO: 1110 - protein, 19 aa, synthetic construct
PLNGAVHLYAQAQAGWVQT

SEQ ID NO: 1111 - protein, 19 aa, synthetic construct
PLNGAVHLYAQAQTGLVQS

SEQ ID NO: 1112 - protein, 19 aa, synthetic construct
PLNGAVHLYAQAQTGCVQI

SEQ ID NO: 1113 - protein, 19 aa, synthetic construct
QLNGAVHLYAQAQPGWVQN

SEQ ID NO: 1114 - protein, 19 aa, synthetic construct
PLNGAVHLYAQAQRPGVQN

SEQ ID NO: 1115 - protein, 19 aa, synthetic construct
PLNGAVHLYAQAQTAAVQH

SEQ ID NO: 1116 - protein, 19 aa, synthetic construct
PLNGADHLYAQAQTMPVQN

SEQ ID NO: 1117 - protein, 19 aa, synthetic construct
PLNGAVHLYAKAQTGWVQT

SEQ ID NO: 1118 - protein, 19 aa, synthetic construct
QLNGAVHLYAQAQKAWVQN

SEQ ID NO: 1119 - protein, 19 aa, synthetic construct
PLNGAVHLYAQAQTGCDQN

SEQ ID NO: 1120 - protein, 19 aa, synthetic construct
PLNGTVHLYAQEQTGSVQN

SEQ ID NO: 1121 - protein, 19 aa, synthetic construct
PLNGAVNLYAQAQSSLVQN

SEQ ID NO: 1122 - protein, 19 aa, synthetic construct
ALNGAVHLYAQAQTGWVEN

SEQ ID NO: 1123 - protein, 19 aa, synthetic construct
PLNGTVHLYAQAQTGWVQY

SEQ ID NO: 1124 - protein, 19 aa, synthetic construct
PINGAVHLYAQAQTGWVQK

SEQ ID NO: 1125 - protein, 19 aa, synthetic construct
PLNGAVHLYAQAQTGRVRN

SEQ ID NO: 1126 - protein, 19 aa, synthetic construct
PLNGAVHLYAQAQTGRDQN

SEQ ID NO: 1127 - protein, 19 aa, synthetic construct
QLNGAVHLYAQAQSALVQN

SEQ ID NO: 1128 - protein, 19 aa, synthetic construct
PLNGVVHLYAQAQTGWVQK

SEQ ID NO: 1129 - protein, 19 aa, synthetic construct
PLNGAVHLYAQAHTGWGQN

SEQ ID NO: 1130 - protein, 19 aa, synthetic construct
PLNGDVHLYAQAQRSLVQN

SEQ ID NO: 1131 - protein, 19 aa, synthetic construct
PLNGNVHLYAQAQTVWVQN

SEQ ID NO: 1132 - protein, 19 aa, synthetic construct
PLNGAVHLYAQAPTGWVQH

SEQ ID NO: 1133 - protein, 19 aa, synthetic construct
PLNGAVHLYSQAQTGWGQN

SEQ ID NO: 1134 - protein, 19 aa, synthetic construct
ALNGSVHLYAQAQTGWVQT

SEQ ID NO: 1135 - protein, 19 aa, synthetic construct
PLNGAVQLYAQAQRSTVQN

SEQ ID NO: 1136 - protein, 19 aa, synthetic construct
PLNGTVHLYAQAQTGTVQN

SEQ ID NO: 1137 - protein, 19 aa, synthetic construct
PLNGTVHLYAQAQTGWVQI

SEQ ID NO: 1138 - protein, 19 aa, synthetic construct
QLNGYVHLYAQAQTGWVQN

SEQ ID NO: 1139 - protein, 6 aa, synthetic construct
TGSVQS

SEQ ID NO: 1140 - protein, 6 aa, synthetic construct
TGSVQT

SEQ ID NO: 1141 - protein, 6 aa, synthetic construct
TGTVQN

SEQ ID NO: 1142 - protein, 6 aa, synthetic construct
TGWEQN

SEQ ID NO: 1143 - protein, 6 aa, synthetic construct
TGWFQN

SEQ ID NO: 1144 - protein, 6 aa, synthetic construct
TGWGQT

SEQ ID NO: 1145 - protein, 6 aa, synthetic construct
TGWVPN

SEQ ID NO: 1146 - protein, 6 aa, synthetic construct
TGWVQD

SEQ ID NO: 1147 - protein, 6 aa, synthetic construct
TGWVQP

SEQ ID NO: 1148 - protein, 6 aa, synthetic construct
TGWVQT

SEQ ID NO: 1149 - protein, 6 aa, synthetic construct
TGWVRN

SEQ ID NO: 1150 - protein, 6 aa, synthetic construct
TKAVQN

SEQ ID NO: 1151 - protein, 6 aa, synthetic construct
TKPVQN

SEQ ID NO: 1152 - protein, 6 aa, synthetic construct
TKQVQN

SEQ ID NO: 1153 - protein, 6 aa, synthetic construct
TKSVQN

SEQ ID NO: 1154 - protein, 6 aa, synthetic construct
TLPVQN

SEQ ID NO: 1155 - protein, 6 aa, synthetic construct
TLQVQN

SEQ ID NO: 1156 - protein, 6 aa, synthetic construct
TMAVQN

SEQ ID NO: 1157 - protein, 6 aa, synthetic construct
TMGVQN

SEQ ID NO: 1158 - protein, 6 aa, synthetic construct
TMKVQN

SEQ ID NO: 1159 - protein, 6 aa, synthetic construct
TMNVQN

SEQ ID NO: 1160 - protein, 6 aa, synthetic construct
TMPVQN

SEQ ID NO: 1161 - protein, 6 aa, synthetic construct
TMQVQN

SEQ ID NO: 1162 - protein, 6 aa, synthetic construct
TMSVKN

SEQ ID NO: 1163 - protein, 6 aa, synthetic construct
TMSVQN

SEQ ID NO: 1164 - protein, 6 aa, synthetic construct
TMSVQT

SEQ ID NO: 1165 - protein, 6 aa, synthetic construct
TMTVQN

SEQ ID NO: 1166 - protein, 6 aa, synthetic construct
TNAVQN

SEQ ID NO: 1167 - protein, 6 aa, synthetic construct
TNQVQN

SEQ ID NO: 1168 - protein, 6 aa, synthetic construct
TNSVQN

SEQ ID NO: 1169 - protein, 6 aa, synthetic construct
TPPVQN

SEQ ID NO: 1170 - protein, 6 aa, synthetic construct
TQHVQN

SEQ ID NO: 1171 - protein, 6 aa, synthetic construct
TQKVQN

SEQ ID NO: 1172 - protein, 6 aa, synthetic construct
TQMVQN

SEQ ID NO: 1173 - protein, 6 aa, synthetic construct
TQNVQN

SEQ ID NO: 1174 - protein, 6 aa, synthetic construct
TQPVQN

SEQ ID NO: 1175 - protein, 6 aa, synthetic construct
TQQVQN

SEQ ID NO: 1176 - protein, 6 aa, synthetic construct
TQTVQN

SEQ ID NO: 1177 - protein, 6 aa, synthetic construct
TRWDQN

SEQ ID NO: 1178 - protein, 6 aa, synthetic construct
TSAVQN

SEQ ID NO: 1179 - protein, 6 aa, synthetic construct
TSGVQN

SEQ ID NO: 1180 - protein, 6 aa, synthetic construct
TSHVQN

SEQ ID NO: 1181 - protein, 6 aa, synthetic construct
TSKVQN

SEQ ID NO: 1182 - protein, 6 aa, synthetic construct
TSLVQN

SEQ ID NO: 1183 - protein, 6 aa, synthetic construct
TSMVQN

SEQ ID NO: 1184 - protein, 6 aa, synthetic construct
TSPDQN

SEQ ID NO: 1185 - protein, 6 aa, synthetic construct
TSQVQN

SEQ ID NO: 1186 - protein, 6 aa, synthetic construct
TSSVQN

SEQ ID NO: 1187 - protein, 6 aa, synthetic construct
TSSVQT

SEQ ID NO: 1188 - protein, 6 aa, synthetic construct
TSTVQN

SEQ ID NO: 1189 - protein, 6 aa, synthetic construct
TSVVQN

SEQ ID NO: 1190 - protein, 6 aa, synthetic construct
TTAVQN

SEQ ID NO: 1191 - protein, 6 aa, synthetic construct
TTGVQN

SEQ ID NO: 1192 - protein, 6 aa, synthetic construct
TTKVQN

SEQ ID NO: 1193 - protein, 6 aa, synthetic construct
TTPVQN

SEQ ID NO: 1194 - protein, 6 aa, synthetic construct
TTPVQT

SEQ ID NO: 1195 - protein, 6 aa, synthetic construct
TTQVQN

SEQ ID NO: 1196 - protein, 6 aa, synthetic construct
TTTVQN

SEQ ID NO: 1197 - protein, 6 aa, synthetic construct
TVAVQN

SEQ ID NO: 1198 - protein, 6 aa, synthetic construct
TVAVQT

SEQ ID NO: 1199 - protein, 6 aa, synthetic construct
TVGVQN

SEQ ID NO: 1200 - protein, 6 aa, synthetic construct
TVQVQN

SEQ ID NO: 1201 - protein, 6 aa, synthetic construct
TVSVKN

SEQ ID NO: 1202 - protein, 6 aa, synthetic construct
TVWVQK

SEQ ID NO: 1203 - protein, 6 aa, synthetic construct
VAAVQN

SEQ ID NO: 1204 - protein, 6 aa, synthetic construct
VAGVQN

SEQ ID NO: 1205 - protein, 6 aa, synthetic construct
VAKVQN

SEQ ID NO: 1206 - protein, 6 aa, synthetic construct
VANVQN

SEQ ID NO: 1207 - protein, 6 aa, synthetic construct
VAQVQN

SEQ ID NO: 1208 - protein, 6 aa, synthetic construct
VASVQN

SEQ ID NO: 1209 - protein, 6 aa, synthetic construct
VATVQN

SEQ ID NO: 1210 - protein, 6 aa, synthetic construct
VGGVQN

SEQ ID NO: 1211 - protein, 6 aa, synthetic construct
VGKVQN

SEQ ID NO: 1212 - protein, 6 aa, synthetic construct
VGNVQN

SEQ ID NO: 1213 - protein, 6 aa, synthetic construct
VGSVQN

SEQ ID NO: 1214 - protein, 6 aa, synthetic construct
VHPVQN

SEQ ID NO: 1215 - protein, 6 aa, synthetic construct
VKAVQN

SEQ ID NO: 1216 - protein, 6 aa, synthetic construct
VKPVQN

SEQ ID NO: 1217 - protein, 6 aa, synthetic construct
VKQVQN

SEQ ID NO: 1218 - protein, 6 aa, synthetic construct
VLPVQN

SEQ ID NO: 1219 - protein, 6 aa, synthetic construct
VLSVQN

SEQ ID NO: 1220 - protein, 6 aa, synthetic construct
VMAVQN

SEQ ID NO: 1221 - protein, 6 aa, synthetic construct
VMQVQN

SEQ ID NO: 1222 - protein, 6 aa, synthetic construct
VMSVQN

SEQ ID NO: 1223 - protein, 6 aa, synthetic construct
VNAVQN

SEQ ID NO: 1224 - protein, 6 aa, synthetic construct
VNGVQN

SEQ ID NO: 1225 - protein, 6 aa, synthetic construct
VNSVQN

SEQ ID NO: 1226 - protein, 6 aa, synthetic construct
VQAVQN

SEQ ID NO: 1227 - protein, 6 aa, synthetic construct
VQNVQN

SEQ ID NO: 1228 - protein, 6 aa, synthetic construct
VQPVQN

SEQ ID NO: 1229 - protein, 6 aa, synthetic construct
VQQVQN

SEQ ID NO: 1230 - protein, 6 aa, synthetic construct
VQSVQN

SEQ ID NO: 1231 - protein, 6 aa, synthetic construct
VQTVQN

SEQ ID NO: 1232 - protein, 6 aa, synthetic construct
VRPVQN

SEQ ID NO: 1233 - protein, 6 aa, synthetic construct
VSAVQN

SEQ ID NO: 1234 - protein, 6 aa, synthetic construct
VSGVQN

SEQ ID NO: 1235 - protein, 6 aa, synthetic construct
VSNVQN

SEQ ID NO: 1236 - protein, 6 aa, synthetic construct
VSPVQT

SEQ ID NO: 1237 - protein, 6 aa, synthetic construct
VSQVQN

SEQ ID NO: 1238 - protein, 6 aa, synthetic construct
VSRVQN

SEQ ID NO: 1239 - protein, 6 aa, synthetic construct
VSSVQK

SEQ ID NO: 1240 - protein, 6 aa, synthetic construct
VSSVQT

SEQ ID NO: 1241 - protein, 6 aa, synthetic construct
VSTVQN

SEQ ID NO: 1242 - protein, 6 aa, synthetic construct
VTAVQN

SEQ ID NO: 1243 - protein, 6 aa, synthetic construct
VTGVQN

SEQ ID NO: 1244 - protein, 6 aa, synthetic construct
VTKVQN

SEQ ID NO: 1245 - protein, 6 aa, synthetic construct
VTPVQN

SEQ ID NO: 1246 - protein, 6 aa, synthetic construct
VTSVQN

SEQ ID NO: 1247 - protein, 6 aa, synthetic construct
TGLVQN

SEQ ID NO: 1248 - protein, 6 aa, synthetic construct
TGWVKN

SEQ ID NO: 1249 - protein, 6 aa, synthetic construct
PGWVQN

SEQ ID NO: 1250 - protein, 6 aa, synthetic construct
TGWVQH

SEQ ID NO: 1251 - protein, 6 aa, synthetic construct
LSGVQN

SEQ ID NO: 1252 - protein, 6 aa, synthetic construct
LSSVQN

SEQ ID NO: 1253 - protein, 6 aa, synthetic construct
LVPVQN

SEQ ID NO: 1254 - protein, 7 aa, synthetic construct
PLNGAVN

SEQ ID NO: 1255 - protein, 7 aa, synthetic construct
PLNGAVQ

SEQ ID NO: 1256 - protein, 7 aa, synthetic construct
PLNGAIH

SEQ ID NO: 1257 - protein, 7 aa, synthetic construct
PLNGALH

SEQ ID NO: 1258 - protein, 7 aa, synthetic construct
PLNGAVP

SEQ ID NO: 1259 - protein, 7 aa, synthetic construct
PLNGAVD

SEQ ID NO: 1260 - protein, 7 aa, synthetic construct
PLNGAAH

SEQ ID NO: 1261 - protein, 7 aa, synthetic construct
PLNGAFH

SEQ ID NO: 1262 - protein, 7 aa, synthetic construct
TLAVPFK

SEQ ID NO: 1263 - protein, 7 aa, synthetic construct
PLNGADH

SEQ ID NO: 1264 - protein, 7 aa, synthetic construct
PLNGAVL

SEQ ID NO: 1265 - protein, 7 aa, synthetic construct
PLNGAGH

SEQ ID NO: 1266 - protein, 7 aa, synthetic construct
PLNGAVR

SEQ ID NO: 1267 - protein, 7 aa, synthetic construct
PLNGAVY

SEQ ID NO: 1268 - protein, 9 aa, synthetic construct
PLNGAVNLY

SEQ ID NO: 1269 - protein, 9 aa, synthetic construct
PLNGAVQLY

SEQ ID NO: 1270 - protein, 9 aa, synthetic construct
PLNGAIHLY

SEQ ID NO: 1271 - protein, 9 aa, synthetic construct
PLNGALHLY

SEQ ID NO: 1272 - protein, 9 aa, synthetic construct
PLNGAVPLY

SEQ ID NO: 1273 - protein, 9 aa, synthetic construct
PLNGAVDLY

SEQ ID NO: 1274 - protein, 9 aa, synthetic construct
PLNGAAHLY

SEQ ID NO: 1275 - protein, 9 aa, synthetic construct
PLNGAVHRY

SEQ ID NO: 1276 - protein, 9 aa, synthetic construct
PLNGAFHLY

SEQ ID NO: 1277 - protein, 9 aa, synthetic construct
PLNGADHLY

SEQ ID NO: 1278 - protein, 9 aa, synthetic construct
PLNGAVLLY

SEQ ID NO: 1279 - protein, 9 aa, synthetic construct
PLNGAGHLY

SEQ ID NO: 1280 - protein, 9 aa, synthetic construct
PLNGAVRLY

SEQ ID NO: 1281 - protein, 9 aa, synthetic construct
PLNGAVHVY

SEQ ID NO: 1282 - protein, 9 aa, synthetic construct
PLNGAVYLY

SEQ ID NO: 1283 - protein, 8 aa, synthetic construct
VHLYAHAQ

SEQ ID NO: 1284 - protein, 8 aa, synthetic construct
VNLYAQAQ

SEQ ID NO: 1285 - protein, 8 aa, synthetic construct
VQLYAQAQ

SEQ ID NO: 1286 - protein, 8 aa, synthetic construct
VHLYAQEQ

SEQ ID NO: 1287 - protein, 8 aa, synthetic construct
IHLYAQAQ

SEQ ID NO: 1288 - protein, 8 aa, synthetic construct
LHLYAQAQ

SEQ ID NO: 1289 - protein, 8 aa, synthetic construct
VPLYAQAQ

SEQ ID NO: 1290 - protein, 8 aa, synthetic construct
VHLYAQAK

SEQ ID NO: 1291 - protein, 8 aa, synthetic construct
VDLYAQAQ

SEQ ID NO: 1292 - protein, 8 aa, synthetic construct
AHLYAQAQ

SEQ ID NO: 1293 - protein, 8 aa, synthetic construct
VHRYAQAQ

SEQ ID NO: 1294 - protein, 8 aa, synthetic construct
FHLYAQAQ

SEQ ID NO: 1295 - protein, 8 aa, synthetic construct
VHLYALAQ

SEQ ID NO: 1296 - protein, 8 aa, synthetic construct
DHLYAQAQ

SEQ ID NO: 1297 - protein, 8 aa, synthetic construct
VHLYAPAQ

SEQ ID NO: 1298 - protein, 8 aa, synthetic construct
VHLYARAQ

SEQ ID NO: 1299 - protein, 8 aa, synthetic construct
VHLYAQAH

SEQ ID NO: 1300 - protein, 8 aa, synthetic construct
VLLYAQAQ

SEQ ID NO: 1301 - protein, 8 aa, synthetic construct
VHLYAQAP

SEQ ID NO: 1302 - protein, 8 aa, synthetic construct
GHLYAQAQ

SEQ ID NO: 1303 - protein, 8 aa, synthetic construct
VRLYAQAQ

SEQ ID NO: 1304 - protein, 8 aa, synthetic construct
VYLYAQAQ

SEQ ID NO: 1305 - protein, 8 aa, synthetic construct
VHLYTQAQ

SEQ ID NO: 1306 - protein, 11 aa, synthetic construct
PLNGAVHLYAH

SEQ ID NO: 1307 - protein, 11 aa, synthetic construct
PLNGAVNLYAQ

SEQ ID NO: 1308 - protein, 11 aa, synthetic construct
PLNGAVQLYAQ

SEQ ID NO: 1309 - protein, 11 aa, synthetic construct
PLNGAIHLYAQ

SEQ ID NO: 1310 - protein, 11 aa, synthetic construct
PLNGALHLYAQ

SEQ ID NO: 1311 - protein, 11 aa, synthetic construct
PLNGAVPLYAQ

SEQ ID NO: 1312 - protein, 11 aa, synthetic construct
PLNGAVDLYAQ

SEQ ID NO: 1313 - protein, 11 aa, synthetic construct
PLNGAAHLYAQ

SEQ ID NO: 1314 - protein, 11 aa, synthetic construct
PLNGAVHRYAQ

SEQ ID NO: 1315 - protein, 11 aa, synthetic construct
PLNGAFHLYAQ

SEQ ID NO: 1316 - protein, 11 aa, synthetic construct
PLNGAVHLYAL

SEQ ID NO: 1317 - protein, 11 aa, synthetic construct
PLNGADHLYAQ

SEQ ID NO: 1318 - protein, 11 aa, synthetic construct
PLNGAVHLYAP

SEQ ID NO: 1319 - protein, 11 aa, synthetic construct
PLNGAVHLYAR

SEQ ID NO: 1320 - protein, 11 aa, synthetic construct
PLNGAVLLYAQ

SEQ ID NO: 1321 - protein, 11 aa, synthetic construct
PLNGAGHLYAQ

SEQ ID NO: 1322 - protein, 11 aa, synthetic construct
PLNGAVRLYAQ

SEQ ID NO: 1323 - protein, 11 aa, synthetic construct
PLNGAVHVYAQ

SEQ ID NO: 1324 - protein, 11 aa, synthetic construct
PLNGAVYLYAQ

SEQ ID NO: 1325 - protein, 11 aa, synthetic construct
PLNGAVHLYTQ

SEQ ID NO: 1326 - protein, 13 aa, synthetic construct
PLNGAVHLYAHAQ

SEQ ID NO: 1327 - protein, 13 aa, synthetic construct
PLNGAVNLYAQAQ

SEQ ID NO: 1328 - protein, 13 aa, synthetic construct
PLNGAVQLYAQAQ

SEQ ID NO: 1329 - protein, 13 aa, synthetic construct
PLNGAVHLYAQEQ

SEQ ID NO: 1330 - protein, 13 aa, synthetic construct
PLNGAIHLYAQAQ

SEQ ID NO: 1331 - protein, 13 aa, synthetic construct
PLNGALHLYAQAQ

SEQ ID NO: 1332 - protein, 13 aa, synthetic construct
PLNGAVPLYAQAQ

SEQ ID NO: 1333 - protein, 13 aa, synthetic construct
PLNGAVHLYAQAK

SEQ ID NO: 1334 - protein, 13 aa, synthetic construct
PLNGAVDLYAQAQ

SEQ ID NO: 1335 - protein, 13 aa, synthetic construct
PLNGAAHLYAQAQ

SEQ ID NO: 1336 - protein, 13 aa, synthetic construct
PLNGAVHRYAQAQ

SEQ ID NO: 1337 - protein, 13 aa, synthetic construct
PLNGAFHLYAQAQ

SEQ ID NO: 1338 - protein, 13 aa, synthetic construct
PLNGAVHLYALAQ

SEQ ID NO: 1339 - protein, 13 aa, synthetic construct
PLNGADHLYAQAQ

SEQ ID NO: 1340 - protein, 13 aa, synthetic construct
PLNGAVHLYAPAQ

SEQ ID NO: 1341 - protein, 13 aa, synthetic construct
PLNGAVHLYARAQ

SEQ ID NO: 1342 - protein, 13 aa, synthetic construct
PLNGAVHLYAQAH

SEQ ID NO: 1343 - protein, 13 aa, synthetic construct
PLNGAVLLYAQAQ

SEQ ID NO: 1344 - protein, 13 aa, synthetic construct
PLNGAVHLYAQAP

SEQ ID NO: 1345 - protein, 13 aa, synthetic construct
PLNGAGHLYAQAQ

SEQ ID NO: 1346 - protein, 13 aa, synthetic construct
PLNGAVRLYAQAQ

SEQ ID NO: 1347 - protein, 13 aa, synthetic construct
PLNGAVHVYAQAQ

SEQ ID NO: 1348 - protein, 13 aa, synthetic construct
PLNGAVYLYAQAQ

SEQ ID NO: 1349 - protein, 13 aa, synthetic construct
PLNGAVHLYTQAQ

SEQ ID NO: 1350 - protein, 6 aa, synthetic construct
TMMVQN

SEQ ID NO: 1351 - protein, 6 aa, synthetic construct
TGGVQS

SEQ ID NO: 1352 - protein, 6 aa, synthetic construct
TGSFQN

SEQ ID NO: 1353 - protein, 6 aa, synthetic construct
RSVVQN

SEQ ID NO: 1354 - protein, 6 aa, synthetic construct
TGSVQK

SEQ ID NO: 1355 - protein, 6 aa, synthetic construct
TQLVQN

SEQ ID NO: 1356 - protein, 6 aa, synthetic construct
TGGVHN

SEQ ID NO: 1357 - protein, 6 aa, synthetic construct
RTPVQN

SEQ ID NO: 1358 - protein, 6 aa, synthetic construct
RQQVQN

SEQ ID NO: 1359 - protein, 6 aa, synthetic construct
TGSVRN

SEQ ID NO: 1360 - protein, 6 aa, synthetic construct
VQGVQN

SEQ ID NO: 1361 - protein, 6 aa, synthetic construct
PGWVQT

SEQ ID NO: 1362 - protein, 6 aa, synthetic construct
STQVQN

SEQ ID NO: 1363 - protein, 6 aa, synthetic construct
QSPVQN

SEQ ID NO: 1364 - protein, 6 aa, synthetic construct
RYSVQN

SEQ ID NO: 1365 - protein, 6 aa, synthetic construct
TQRVQN

SEQ ID NO: 1366 - protein, 6 aa, synthetic construct
SAGVQN

SEQ ID NO: 1367 - protein, 6 aa, synthetic construct
SAPVQT

SEQ ID NO: 1368 - protein, 6 aa, synthetic construct
RQSVQN

SEQ ID NO: 1369 - protein, 6 aa, synthetic construct
SQPVQN

SEQ ID NO: 1370 - protein, 6 aa, synthetic construct
VASVKN

SEQ ID NO: 1371 - protein, 6 aa, synthetic construct
TAWVRN

SEQ ID NO: 1372 - protein, 6 aa, synthetic construct
TGGGQN

SEQ ID NO: 1373 - protein, 6 aa, synthetic construct
STSVQN

SEQ ID NO: 1374 - protein, 6 aa, synthetic construct
VLGVQN

SEQ ID NO: 1375 - protein, 6 aa, synthetic construct
NQPVQN

SEQ ID NO: 1376 - protein, 6 aa, synthetic construct
LGTVQN

SEQ ID NO: 1377 - protein, 6 aa, synthetic construct
RAGVQN

SEQ ID NO: 1378 - protein, 6 aa, synthetic construct
TGGVKN

SEQ ID NO: 1379 - protein, 6 aa, synthetic construct
TAWLQN

SEQ ID NO: 1380 - protein, 6 aa, synthetic construct
TRWVQK

SEQ ID NO: 1381 - protein, 6 aa, synthetic construct
LAPVKN

SEQ ID NO: 1382 - protein, 6 aa, synthetic construct
TGSVQD

SEQ ID NO: 1383 - protein, 6 aa, synthetic construct
TGMVQN

SEQ ID NO: 1384 - protein, 6 aa, synthetic construct
LSNVQN

SEQ ID NO: 1385 - protein, 6 aa, synthetic construct
RLPVQN

SEQ ID NO: 1386 - protein, 6 aa, synthetic construct
RQGVQN

SEQ ID NO: 1387 - protein, 6 aa, synthetic construct
STPVQT

SEQ ID NO: 1388 - protein, 6 aa, synthetic construct
TTPVKN

SEQ ID NO: 1389 - protein, 6 aa, synthetic construct
RLTVQN

SEQ ID NO: 1390 - protein, 6 aa, synthetic construct
TLRVQN

SEQ ID NO: 1391 - protein, 6 aa, synthetic construct
SAFVQN

SEQ ID NO: 1392 - protein, 6 aa, synthetic construct
SVQVQN

SEQ ID NO: 1393 - protein, 6 aa, synthetic construct
LLPVQN

SEQ ID NO: 1394 - protein, 6 aa, synthetic construct
RTQVQN

SEQ ID NO: 1395 - protein, 6 aa, synthetic construct
TGSDQN

SEQ ID NO: 1396 - protein, 6 aa, synthetic construct
VASDQN

SEQ ID NO: 1397 - protein, 6 aa, synthetic construct
VSPVKN

SEQ ID NO: 1398 - protein, 6 aa, synthetic construct
LPPVQN

SEQ ID NO: 1399 - protein, 6 aa, synthetic construct
SSPVQT

SEQ ID NO: 1400 - protein, 6 aa, synthetic construct
AQPVQN

SEQ ID NO: 1401 - protein, 6 aa, synthetic construct
TPQVQN

SEQ ID NO: 1402 - protein, 6 aa, synthetic construct
TSWVQN

SEQ ID NO: 1403 - protein, 6 aa, synthetic construct
TGGDQN

SEQ ID NO: 1404 - protein, 6 aa, synthetic construct
LSPVKN

SEQ ID NO: 1405 - protein, 6 aa, synthetic construct
SSPVKN

SEQ ID NO: 1406 - protein, 6 aa, synthetic construct
NTTVQN

SEQ ID NO: 1407 - protein, 6 aa, synthetic construct
TTRVQN

SEQ ID NO: 1408 - protein, 6 aa, synthetic construct
TQWVQN

SEQ ID NO: 1409 - protein, 6 aa, synthetic construct
TGSVHN

SEQ ID NO: 1410 - protein, 6 aa, synthetic construct
TGGLQN

SEQ ID NO: 1411 - protein, 6 aa, synthetic construct
TAWVQK

SEQ ID NO: 1412 - protein, 6 aa, synthetic construct
TGRVQT

SEQ ID NO: 1413 - protein, 6 aa, synthetic construct
NTQVQN

SEQ ID NO: 1414 - protein, 6 aa, synthetic construct
TGWLQN

SEQ ID NO: 1415 - protein, 6 aa, synthetic construct
TYAVQN

SEQ ID NO: 1416 - protein, 6 aa, synthetic construct
TLSVQN

SEQ ID NO: 1417 - protein, 6 aa, synthetic construct
NLPVQN

SEQ ID NO: 1418 - protein, 6 aa, synthetic construct
TSSDQN

SEQ ID NO: 1419 - protein, 6 aa, synthetic construct
ATSVQN

SEQ ID NO: 1420 - protein, 6 aa, synthetic construct
TAWFQN

SEQ ID NO: 1421 - protein, 6 aa, synthetic construct
ATQVQN

SEQ ID NO: 1422 - protein, 6 aa, synthetic construct
VSSVKN

SEQ ID NO: 1423 - protein, 6 aa, synthetic construct
TGSGQN

SEQ ID NO: 1424 - protein, 6 aa, synthetic construct
LQPVQT

SEQ ID NO: 1425 - skipped

SEQ ID NO: 1426 - protein, 6 aa, synthetic construct
TQAVQN

SEQ ID NO: 1427 - protein, 6 aa, synthetic construct
TGWVQK

SEQ ID NO: 1428 - protein, 6 aa, synthetic construct
VMPVQN

SEQ ID NO: 1429 - protein, 6 aa, synthetic construct
TVSVQK

SEQ ID NO: 1430 - protein, 6 aa, synthetic construct
TAWAQN

SEQ ID NO: 1431 - protein, 6 aa, synthetic construct
NALVQN

SEQ ID NO: 1432 - protein, 6 aa, synthetic construct
RMLVQN

SEQ ID NO: 1433 - protein, 6 aa, synthetic construct
TVAVKN

SEQ ID NO: 1434 - protein, 6 aa, synthetic construct
RQLVQN

SEQ ID NO: 1435 - protein, 6 aa, synthetic construct
TLGVQN

SEQ ID NO: 1436 - protein, 6 aa, synthetic construct
LGPVQT

SEQ ID NO: 1437 - protein, 6 aa, synthetic construct
TGSVKN

SEQ ID NO: 1438 - protein, 6 aa, synthetic construct
TMSDQN

SEQ ID NO: 1439 - protein, 6 aa, synthetic construct
LASVKN

SEQ ID NO: 1440 - protein, 6 aa, synthetic construct
TGFVQN

SEQ ID NO: 1441 - protein, 6 aa, synthetic construct
SALVQN

SEQ ID NO: 1442 - protein, 6 aa, synthetic construct
TGWVKT

SEQ ID NO: 1443 - protein, 6 aa, synthetic construct
TGWGQN

SEQ ID NO: 1444 - protein, 6 aa, synthetic construct
LSAVQN

SEQ ID NO: 1445 - protein, 6 aa, synthetic construct
TMQVQT

SEQ ID NO: 1446 - protein, 6 aa, synthetic construct
TGQVQN

SEQ ID NO: 1447 - protein, 6 aa, synthetic construct
TSPVKN

SEQ ID NO: 1448 - protein, 6 aa, synthetic construct
LSQVQT

SEQ ID NO: 1449 - protein, 6 aa, synthetic construct
TGSVLN

SEQ ID NO: 1450 - protein, 6 aa, synthetic construct
TNGVQN

SEQ ID NO: 1451 - protein, 6 aa, synthetic construct
TGWVKK

SEQ ID NO: 1452 - protein, 6 aa, synthetic construct
AAAVQN

SEQ ID NO: 1453 - protein, 6 aa, synthetic construct
SAVVQN

SEQ ID NO: 1454 - protein, 6 aa, synthetic construct
PGWVQH

SEQ ID NO: 1455 - protein, 6 aa, synthetic construct
TASDQN

SEQ ID NO: 1456 - protein, 6 aa, synthetic construct
SSRVQN

SEQ ID NO: 1457 - protein, 6 aa, synthetic construct
SPPVQN

SEQ ID NO: 1458 - protein, 6 aa, synthetic construct
VQPVQT

SEQ ID NO: 1459 - protein, 6 aa, synthetic construct
TSSVKN

SEQ ID NO: 1460 - protein, 6 aa, synthetic construct
LSPLQN

SEQ ID NO: 1461 - protein, 6 aa, synthetic construct
VSQVQK

SEQ ID NO: 1462 - protein, 6 aa, synthetic construct
LVGVQN

SEQ ID NO: 1463 - protein, 6 aa, synthetic construct
TLSVKN

SEQ ID NO: 1464 - protein, 6 aa, synthetic construct
TGWFQK

SEQ ID NO: 1465 - protein, 6 aa, synthetic construct
TPAVQN

SEQ ID NO: 1466 - protein, 6 aa, synthetic construct
TVGVKN

SEQ ID NO: 1467 - protein, 6 aa, synthetic construct
KGWDQN

SEQ ID NO: 1468 - protein, 6 aa, synthetic construct
TAWVLN

SEQ ID NO: 1469 - protein, 6 aa, synthetic construct
VPPVQN

SEQ ID NO: 1470 - protein, 6 aa, synthetic construct
ATGVQN

SEQ ID NO: 1471 - protein, 6 aa, synthetic construct
TGGVQI

SEQ ID NO: 1472 - protein, 6 aa, synthetic construct
TGWVLN

SEQ ID NO: 1473 - protein, 6 aa, synthetic construct
TAWGQN

SEQ ID NO: 1474 - protein, 6 aa, synthetic construct
TGWVHN

SEQ ID NO: 1475 - protein, 6 aa, synthetic construct
LGSVQT

SEQ ID NO: 1476 - protein, 6 aa, synthetic construct
SANVQN

SEQ ID NO: 1477 - protein, 6 aa, synthetic construct
TGGVQD

SEQ ID NO: 1478 - protein, 6 aa, synthetic construct
TMAVKN

SEQ ID NO: 1479 - protein, 6 aa, synthetic construct
TASVKN

SEQ ID NO: 1480 - protein, 6 aa, synthetic construct
SSPVQK

SEQ ID NO: 1481 - protein, 6 aa, synthetic construct
TGTVQT

SEQ ID NO: 1482 - protein, 6 aa, synthetic construct
TGWVQI

SEQ ID NO: 1483 - protein, 6 aa, synthetic construct
TVWVKN

SEQ ID NO: 1484 - protein, 6 aa, synthetic construct
SQQVQN

SEQ ID NO: 1485 - protein, 6 aa, synthetic construct
VGSVQT

SEQ ID NO: 1486 - protein, 6 aa, synthetic construct
SSMVQN

SEQ ID NO: 1487 - protein, 6 aa, synthetic construct
TSPVQK

SEQ ID NO: 1488 - protein, 6 aa, synthetic construct
AVGVQN

SEQ ID NO: 1489 - protein, 6 aa, synthetic construct
VAPVQN

SEQ ID NO: 1490 - protein, 6 aa, synthetic construct
TLPVQK

SEQ ID NO: 1491 - protein, 6 aa, synthetic construct
TGRVQH

SEQ ID NO: 1492 - protein, 6 aa, synthetic construct
TPSVQN

SEQ ID NO: 1493 - protein, 6 aa, synthetic construct
TGWVEN

SEQ ID NO: 1494 - protein, 6 aa, synthetic construct
RGWVQN

SEQ ID NO: 1495 - protein, 6 aa, synthetic construct
TGSVEN

SEQ ID NO: 1496 - protein, 6 aa, synthetic construct
SSLVQN

SEQ ID NO: 1497 - protein, 6 aa, synthetic construct
TAWVKN

SEQ ID NO: 1498 - protein, 6 aa, synthetic construct
TYSVQN

SEQ ID NO: 1499 - protein, 6 aa, synthetic construct
LAAVQT

SEQ ID NO: 1500 - protein, 6 aa, synthetic construct
TALVKN

SEQ ID NO: 1501 - protein, 6 aa, synthetic construct
TGWVQY

SEQ ID NO: 1502 - protein, 6 aa, synthetic construct
TLPVQT

SEQ ID NO: 1503 - protein, 6 aa, synthetic construct
TGLVQH

SEQ ID NO: 1504 - protein, 6 aa, synthetic construct
TPTVQN

SEQ ID NO: 1505 - protein, 6 aa, synthetic construct
TASVQK

SEQ ID NO: 1506 - protein, 6 aa, synthetic construct
TSPVQI

SEQ ID NO: 1507 - protein, 6 aa, synthetic construct
IGWVQN

SEQ ID NO: 1508 - protein, 6 aa, synthetic construct
TGWDKN

SEQ ID NO: 1509 - protein, 6 aa, synthetic construct
KSSVQN

SEQ ID NO: 1510 - protein, 6 aa, synthetic construct
TGYVQN

SEQ ID NO: 1511 - protein, 6 aa, synthetic construct
RGWVQT

SEQ ID NO: 1512 - protein, 6 aa, synthetic construct
RSLVQN

SEQ ID NO: 1513 - protein, 6 aa, synthetic construct
TGGVEN

SEQ ID NO: 1514 - protein, 6 aa, synthetic construct
TGCVRN

SEQ ID NO: 1515 - skipped

SEQ ID NO: 1516 - protein, 6 aa, synthetic construct
LSPVQS

SEQ ID NO: 1517 - protein, 6 aa, synthetic construct
TGPVQT

SEQ ID NO: 1518 - protein, 6 aa, synthetic construct
TVGVQK

SEQ ID NO: 1519 - protein, 6 aa, synthetic construct
TASGQN

SEQ ID NO: 1520 - protein, 6 aa, synthetic construct
SVSVQN

SEQ ID NO: 1521 - protein, 6 aa, synthetic construct
SGPVQT

SEQ ID NO: 1522 - protein, 6 aa, synthetic construct
VMSVKN

SEQ ID NO: 1523 - protein, 6 aa, synthetic construct
LGSVQK

SEQ ID NO: 1524 - protein, 6 aa, synthetic construct
TGLVLN

SEQ ID NO: 1525 - protein, 6 aa, synthetic construct
TSNVQN

SEQ ID NO: 1526 - protein, 6 aa, synthetic construct
TGWGHN

SEQ ID NO: 1527 - protein, 6 aa, synthetic construct
SQMVQN

SEQ ID NO: 1528 - protein, 6 aa, synthetic construct
TVSVHN

SEQ ID NO: 1529 - protein, 6 aa, synthetic construct
LSSVQT

SEQ ID NO: 1530 - protein, 6 aa, synthetic construct
TASVRN

SEQ ID NO: 1531 - protein, 6 aa, synthetic construct
VPAVQN

SEQ ID NO: 1532 - protein, 6 aa, synthetic construct
TGRVQK

SEQ ID NO: 1533 - protein, 6 aa, synthetic construct
AMSVQN

SEQ ID NO: 1534 - protein, 6 aa, synthetic construct
TAWVHN

SEQ ID NO: 1535 - protein, 6 aa, synthetic construct
TGLVRN

SEQ ID NO: 1536 - protein, 6 aa, synthetic construct
RTLVQT

SEQ ID NO: 1537 - protein, 6 aa, synthetic construct
TGSIQN

SEQ ID NO: 1538 - protein, 6 aa, synthetic construct
LSSVKN

SEQ ID NO: 1539 - protein, 6 aa, synthetic construct
TLQVQK

SEQ ID NO: 1540 - protein, 6 aa, synthetic construct
VGSVKN

SEQ ID NO: 1541 - protein, 6 aa, synthetic construct
LAPLQN

SEQ ID NO: 1542 - protein, 6 aa, synthetic construct
TPGVQN

SEQ ID NO: 1543 - protein, 6 aa, synthetic construct
TGVVQN

SEQ ID NO: 1544 - protein, 6 aa, synthetic construct
VPQVQN

SEQ ID NO: 1545 - protein, 6 aa, synthetic construct
TGCVQK

SEQ ID NO: 1546 - protein, 6 aa, synthetic construct
TRWVQT

SEQ ID NO: 1547 - protein, 6 aa, synthetic construct
TGLDQN

SEQ ID NO: 1548 - protein, 6 aa, synthetic construct
VSSVHN

SEQ ID NO: 1549 - protein, 6 aa, synthetic construct
KGWVQT

SEQ ID NO: 1550 - protein, 6 aa, synthetic construct
SLPVQN

SEQ ID NO: 1551 - protein, 6 aa, synthetic construct
TTSVHN

SEQ ID NO: 1552 - protein, 6 aa, synthetic construct
TVWVQN

SEQ ID NO: 1553 - protein, 6 aa, synthetic construct
TAQLQN

SEQ ID NO: 1554 - protein, 6 aa, synthetic construct
TRWVKN

SEQ ID NO: 1555 - protein, 6 aa, synthetic construct
TAWIQN

SEQ ID NO: 1556 - protein, 6 aa, synthetic construct
LSQVKN

SEQ ID NO: 1557 - protein, 6 aa, synthetic construct
TSTVKN

SEQ ID NO: 1558 - protein, 6 aa, synthetic construct
ALPVQN

SEQ ID NO: 1559 - protein, 6 aa, synthetic construct
TSMVQT

SEQ ID NO: 1560 - protein, 6 aa, synthetic construct
TSSVQH

SEQ ID NO: 1561 - protein, 6 aa, synthetic construct
TAMVKN

SEQ ID NO: 1562 - protein, 6 aa, synthetic construct
TPWVQN

SEQ ID NO: 1563 - protein, 6 aa, synthetic construct
TPRVQN

SEQ ID NO: 1564 - protein, 6 aa, synthetic construct
SSSVQN

SEQ ID NO: 1565 - protein, 6 aa, synthetic construct
RPPVQN

SEQ ID NO: 1566 - protein, 6 aa, synthetic construct
LAGVKN

SEQ ID NO: 1567 - protein, 6 aa, synthetic construct
TSPAQN

SEQ ID NO: 1568 - protein, 6 aa, synthetic construct
RSPVQT

SEQ ID NO: 1569 - protein, 6 aa, synthetic construct
TGWVPH

SEQ ID NO: 1570 - protein, 6 aa, synthetic construct
PGWGQN

SEQ ID NO: 1571 - protein, 6 aa, synthetic construct
IPPVQN

SEQ ID NO: 1572 - protein, 6 aa, synthetic construct
TGRVKN

SEQ ID NO: 1573 - protein, 6 aa, synthetic construct
TGRLQN

SEQ ID NO: 1574 - protein, 6 aa, synthetic construct
LSSVQH

SEQ ID NO: 1575 - protein, 6 aa, synthetic construct
AGWVQT

SEQ ID NO: 1576 - protein, 6 aa, synthetic construct
TGLVQS

SEQ ID NO: 1577 - protein, 6 aa, synthetic construct
TGCVQI

SEQ ID NO: 1578 - protein, 6 aa, synthetic construct
RPGVQN

SEQ ID NO: 1579 - protein, 6 aa, synthetic construct
TAAVQH

SEQ ID NO: 1580 - protein, 6 aa, synthetic construct
TGCDQN

SEQ ID NO: 1581 - protein, 6 aa, synthetic construct
TGRVRN

SEQ ID NO: 1582 - protein, 6 aa, synthetic construct
TGRDQN

SEQ ID NO: 1583-1846 - skipped (264 entries)

SEQ ID NO: 1847 - DNA, 22 bp, synthetic construct
  source 1..22: mol_type = other DNA
agtgaattctaccagtgccata

SEQ ID NO: 1848-1864 - skipped (17 entries)

SEQ ID NO: 1865 - DNA, 23 bp, synthetic construct
  source 1..23: mol_type = other DNA
acaaacaccattgtcacactcca

SEQ ID NO: 1866 - DNA, 71 bp, synthetic construct
  source 1..71: mol_type = other DNA
acaaacaccattgtcacactccacacaaacaccattgtcacactccacacaaacaccattgtcacactcca

SEQ ID NO: 1867 - DNA, 24 bp, synthetic construct
  source 1..24: mol_type = other DNA
agtgtgagttctaccattgccaaa

SEQ ID NO: 1868 - DNA, 23 bp, synthetic construct
  source 1..23: mol_type = other DNA
agcaaaaatgtgctagtgccaaa

SEQ ID NO: 1869 - DNA, 23 bp, synthetic construct
  source 1..23: mol_type = other DNA
tccataaagtaggaaacactaca

SEQ ID NO: 1870-2003 - skipped (134 entries)

SEQ ID NO: 2004 - DNA, 21 bp, synthetic construct
  source 1..21: mol_type = other DNA
  misc_feature 1..19: note = RNA
  misc_feature 20..21: note = DNA
cggaggtctggcctataactt

SEQ ID NO: 2005 - DNA, 21 bp, synthetic construct
  source 1..21: mol_type = other DNA
  misc_feature 1..19: note = RNA
  misc_feature 20..21: note = DNA
ggaggtctggcctataaactt

SEQ ID NO: 2006 - DNA, 21 bp, synthetic construct
  source 1..21: mol_type = other DNA
  misc_feature 1..19: note = RNA
  misc_feature 20..21: note = DNA
gaggtctggcctataaagctt

SEQ ID NO: 2007 - DNA, 21 bp, synthetic construct
  source 1..21: mol_type = other DNA
  misc_feature 1..19: note = RNA
  misc_feature 20..21: note = DNA
aggtctggcctataaagtctt

SEQ ID NO: 2008 - DNA, 21 bp, synthetic construct
  source 1..21: mol_type = other DNA
  misc_feature 1..19: note = RNA
  misc_feature 20..21: note = DNA
ggtctggcctataaagtactt

SEQ ID NO: 2009 - DNA, 21 bp, synthetic construct
  source 1..21: mol_type = other DNA
  misc_feature 1..19: note = RNA
  misc_feature 20..21: note = DNA
tctggcctataaagtagtctt

SEQ ID NO: 2010 - DNA, 21 bp, synthetic construct
  source 1..21: mol_type = other DNA
  misc_feature 1..19: note = RNA
  misc_feature 20..21: note = DNA
ctggcctataaagtagtcctt

SEQ ID NO: 2011 - DNA, 21 bp, synthetic construct
  source 1..21: mol_type = other DNA
  misc_feature 1..19: note = RNA
  misc_feature 20..21: note = DNA
tggcctataaagtagtcgctt

SEQ ID NO: 2012 - DNA, 21 bp, synthetic construct
  source 1..21: mol_type = other DNA
  misc_feature 1..19: note = RNA
  misc_feature 20..21: note = DNA
ggcctataaagtagtcgcctt

SEQ ID NO: 2013 - DNA, 21 bp, synthetic construct
  source 1..21: mol_type = other DNA
  misc_feature 1..19: note = RNA
  misc_feature 20..21: note = DNA
gcctataaagtagtcgcgctt

SEQ ID NO: 2014 - DNA, 21 bp, synthetic construct
  source 1..21: mol_type = other DNA
  misc_feature 1..19: note = RNA
  misc_feature 20..21: note = DNA
cctataaagtagtcgcggctt

SEQ ID NO: 2015 - DNA, 21 bp, synthetic construct
  source 1..21: mol_type = other DNA
  misc_feature 1..19: note = RNA
  misc_feature 20..21: note = DNA
gtcgtagtctcctgcagcctt

SEQ ID NO: 2016 - DNA, 21 bp, synthetic construct
  source 1..21: mol_type = other DNA
  misc_feature 1..19: note = RNA
  misc_feature 20..21: note = DNA
cgtagtctcctgcagcgtctt

SEQ ID NO: 2017 - DNA, 21 bp, synthetic construct
  source 1..21: mol_type = other DNA
  misc_feature 1..19: note = RNA
  misc_feature 20..21: note = DNA
gtagtctcctgcagcgtcctt

SEQ ID NO: 2018 - DNA, 21 bp, synthetic construct
  source 1..21: mol_type = other DNA
  misc_feature 1..19: note = RNA
  misc_feature 20..21: note = DNA
tagtctcctgcagcgtctctt

SEQ ID NO: 2019 - DNA, 21 bp, synthetic construct
  source 1..21: mol_type = other DNA
  misc_feature 1..19: note = RNA
  misc_feature 20..21: note = DNA
atggcgacgaaggccgtgctt

SEQ ID NO: 2020 - DNA, 21 bp, synthetic construct
  source 1..21: mol_type = other DNA
  misc_feature 1..19: note = RNA
  misc_feature 20..21: note = DNA
cgacgaaggccgtgtgcgctt

SEQ ID NO: 2021 - DNA, 21 bp, synthetic construct
  source 1..21: mol_type = other DNA
  misc_feature 1..19: note = RNA
  misc_feature 20..21: note = DNA
gaaggccgtgtgcgtgctctt

SEQ ID NO: 2022 - DNA, 21 bp, synthetic construct
  source 1..21: mol_type = other DNA
  misc_feature 1..19: note = RNA
  misc_feature 20..21: note = DNA
ggccgtgtgcgtgctgaactt

SEQ ID NO: 2023 - DNA, 21 bp, synthetic construct
  source 1..21: mol_type = other DNA
  misc_feature 1..19: note = RNA
  misc_feature 20..21: note = DNA
agggcgacggcccagtgcctt

SEQ ID NO: 2024 - DNA, 21 bp, synthetic construct
  source 1..21: mol_type = other DNA
  misc_feature 1..19: note = RNA
  misc_feature 20..21: note = DNA
tgcagggcatcatcaattctt

SEQ ID NO: 2025 - DNA, 21 bp, synthetic construct
  source 1..21: mol_type = other DNA
  misc_feature 1..19: note = RNA
  misc_feature 20..21: note = DNA
gcagggcatcatcaatttctt

SEQ ID NO: 2026 - DNA, 21 bp, synthetic construct
  source 1..21: mol_type = other DNA
  misc_feature 1..19: note = RNA
  misc_feature 20..21: note = DNA
agggcatcatcaatttcgctt

SEQ ID NO: 2027 - DNA, 21 bp, synthetic construct
  source 1..21: mol_type = other DNA
  misc_feature 1..19: note = RNA
  misc_feature 20..21: note = DNA
gggcatcatcaatttcgactt

SEQ ID NO: 2028 - DNA, 21 bp, synthetic construct
  source 1..21: mol_type = other DNA
  misc_feature 1..19: note = RNA
  misc_feature 20..21: note = DNA
ggcatcatcaatttcgagctt

SEQ ID NO: 2029 - DNA, 21 bp, synthetic construct
  source 1..21: mol_type = other DNA
  misc_feature 1..19: note = RNA
  misc_feature 20..21: note = DNA
gcatcatcaatttcgagcctt

SEQ ID NO: 2030 - DNA, 21 bp, synthetic construct
  source 1..21: mol_type = other DNA
  misc_feature 1..19: note = RNA
  misc_feature 20..21: note = DNA
catcatcaatttcgagcactt

SEQ ID NO: 2031 - DNA, 21 bp, synthetic construct
  source 1..21: mol_type = other DNA
  misc_feature 1..19: note = RNA
  misc_feature 20..21: note = DNA
aatttcgagcagaaggaactt

SEQ ID NO: 2032 - DNA, 21 bp, synthetic construct
  source 1..21: mol_type = other DNA
  misc_feature 1..19: note = RNA
  misc_feature 20..21: note = DNA
ttcgagcagaaggaaagtctt

SEQ ID NO: 2033 - DNA, 21 bp, synthetic construct
  source 1..21: mol_type = other DNA
  misc_feature 1..19: note = RNA
  misc_feature 20..21: note = DNA
tcgagcagaaggaaagtactt

SEQ ID NO: 2034 - DNA, 21 bp, synthetic construct
  source 1..21: mol_type = other DNA
  misc_feature 1..19: note = RNA
  misc_feature 20..21: note = DNA
aaggtgtggggaagcattctt

SEQ ID NO: 2035 - DNA, 21 bp, synthetic construct
  source 1..21: mol_type = other DNA
  misc_feature 1..19: note = RNA
  misc_feature 20..21: note = DNA
ggtgtggggaagcattaactt

SEQ ID NO: 2036 - DNA, 21 bp, synthetic construct
  source 1..21: mol_type = other DNA
  misc_feature 1..19: note = RNA
  misc_feature 20..21: note = DNA
gactgactgaaggcctgcctt

SEQ ID NO: 2037 - DNA, 21 bp, synthetic construct
  source 1..21: mol_type = other DNA
  misc_feature 1..19: note = RNA
  misc_feature 20..21: note = DNA
ctgactgaaggcctgcatctt

SEQ ID NO: 2038 - DNA, 21 bp, synthetic construct
  source 1..21: mol_type = other DNA
  misc_feature 1..19: note = RNA
  misc_feature 20..21: note = DNA
tgactgaaggcctgcatgctt

SEQ ID NO: 2039 - DNA, 21 bp, synthetic construct
  source 1..21: mol_type = other DNA
  misc_feature 1..19: note = RNA
  misc_feature 20..21: note = DNA
tgaaggcctgcatggattctt

SEQ ID NO: 2040 - DNA, 21 bp, synthetic construct
  source 1..21: mol_type = other DNA
  misc_feature 1..19: note = RNA
  misc_feature 20..21: note = DNA
gaaggcctgcatggattcctt

SEQ ID NO: 2041 - DNA, 21 bp, synthetic construct
  source 1..21: mol_type = other DNA
  misc_feature 1..19: note = RNA
  misc_feature 20..21: note = DNA
tgcatggattccatgttcctt

SEQ ID NO: 2042 - DNA, 21 bp, synthetic construct
  source 1..21: mol_type = other DNA
  misc_feature 1..19: note = RNA
  misc_feature 20..21: note = DNA
catggattccatgttcatctt

SEQ ID NO: 2043 - DNA, 21 bp, synthetic construct
  source 1..21: mol_type = other DNA
  misc_feature 1..19: note = RNA
  misc_feature 20..21: note = DNA
ggattccatgttcatgagctt

SEQ ID NO: 2044 - DNA, 21 bp, synthetic construct
  source 1..21: mol_type = other DNA
  misc_feature 1..19: note = RNA
  misc_feature 20..21: note = DNA
ttccatgttcatgagtttctt

SEQ ID NO: 2045 - DNA, 21 bp, synthetic construct
  source 1..21: mol_type = other DNA
  misc_feature 1..19: note = RNA
  misc_feature 20..21: note = DNA
gttcatgagtttggagatctt

SEQ ID NO: 2046 - DNA, 21 bp, synthetic construct
  source 1..21: mol_type = other DNA
  misc_feature 1..19: note = RNA
  misc_feature 20..21: note = DNA
ttcatgagtttggagatactt

SEQ ID NO: 2047 - DNA, 21 bp, synthetic construct
  source 1..21: mol_type = other DNA
  misc_feature 1..19: note = RNA
  misc_feature 20..21: note = DNA
tgagtttggagataatacctt

SEQ ID NO: 2048 - DNA, 21 bp, synthetic construct
  source 1..21: mol_type = other DNA
  misc_feature 1..19: note = RNA
  misc_feature 20..21: note = DNA
gagtttggagataatacactt

SEQ ID NO: 2049 - DNA, 21 bp, synthetic construct
  source 1..21: mol_type = other DNA
  misc_feature 1..19: note = RNA
  misc_feature 20..21: note = DNA
aggctgtaccagtgcaggctt

SEQ ID NO: 2050 - DNA, 21 bp, synthetic construct
  source 1..21: mol_type = other DNA
  misc_feature 1..19: note = RNA
  misc_feature 20..21: note = DNA
ggctgtaccagtgcaggtctt

SEQ ID NO: 2051 - DNA, 21 bp, synthetic construct
  source 1..21: mol_type = other DNA
  misc_feature 1..19: note = RNA
  misc_feature 20..21: note = DNA
gcaggtcctcactttaatctt

SEQ ID NO: 2052 - DNA, 21 bp, synthetic construct
  source 1..21: mol_type = other DNA
  misc_feature 1..19: note = RNA
  misc_feature 20..21: note = DNA
caggtcctcactttaatcctt

SEQ ID NO: 2053 - DNA, 21 bp, synthetic construct
  source 1..21: mol_type = other DNA
  misc_feature 1..19: note = RNA
  misc_feature 20..21: note = DNA
tcactttaatcctctatcctt

SEQ ID NO: 2054 - DNA, 21 bp, synthetic construct
  source 1..21: mol_type = other DNA
  misc_feature 1..19: note = RNA
  misc_feature 20..21: note = DNA
ctatccagaaaacacggtctt

SEQ ID NO: 2055 - DNA, 21 bp, synthetic construct
  source 1..21: mol_type = other DNA
  misc_feature 1..19: note = RNA
  misc_feature 20..21: note = DNA
tatccagaaaacacggtgctt

SEQ ID NO: 2056 - DNA, 21 bp, synthetic construct
  source 1..21: mol_type = other DNA
  misc_feature 1..19: note = RNA
  misc_feature 20..21: note = DNA
atccagaaaacacggtggctt

SEQ ID NO: 2057 - DNA, 21 bp, synthetic construct
  source 1..21: mol_type = other DNA
  misc_feature 1..19: note = RNA
  misc_feature 20..21: note = DNA
ccagaaaacacggtgggcctt

SEQ ID NO: 2058 - DNA, 21 bp, synthetic construct
  source 1..21: mol_type = other DNA
  misc_feature 1..19: note = RNA
  misc_feature 20..21: note = DNA
gaaaacacggtgggccaactt

SEQ ID NO: 2059 - DNA, 21 bp, synthetic construct
  source 1..21: mol_type = other DNA
  misc_feature 1..19: note = RNA
  misc_feature 20..21: note = DNA
aaaacacggtgggccaaactt

SEQ ID NO: 2060 - DNA, 21 bp, synthetic construct
  source 1..21: mol_type = other DNA
  misc_feature 1..19: note = RNA
  misc_feature 20..21: note = DNA
cggtgggccaaaggatgactt

SEQ ID NO: 2061 - DNA, 21 bp, synthetic construct
  source 1..21: mol_type = other DNA
  misc_feature 1..19: note = RNA
  misc_feature 20..21: note = DNA
aggatgaagagaggcatgctt

SEQ ID NO: 2062 - DNA, 21 bp, synthetic construct
  source 1..21: mol_type = other DNA
  misc_feature 1..19: note = RNA
  misc_feature 20..21: note = DNA
atgaagagaggcatgttgctt

SEQ ID NO: 2063 - DNA, 21 bp, synthetic construct
  source 1..21: mol_type = other DNA
  misc_feature 1..19: note = RNA
  misc_feature 20..21: note = DNA
gagaggcatgttggagacctt

SEQ ID NO: 2064 - DNA, 21 bp, synthetic construct
  source 1..21: mol_type = other DNA
  misc_feature 1..19: note = RNA
  misc_feature 20..21: note = DNA
agaggcatgttggagactctt

SEQ ID NO: 2065 - DNA, 21 bp, synthetic construct
  source 1..21: mol_type = other DNA
  misc_feature 1..19: note = RNA
  misc_feature 20..21: note = DNA
atgttggagacttgggcactt

SEQ ID NO: 2066 - DNA, 21 bp, synthetic construct
  source 1..21: mol_type = other DNA
  misc_feature 1..19: note = RNA
  misc_feature 20..21: note = DNA
gttggagacttgggcaatctt

SEQ ID NO: 2067 - DNA, 21 bp, synthetic construct
  source 1..21: mol_type = other DNA
  misc_feature 1..19: note = RNA
  misc_feature 20..21: note = DNA
ggagacttgggcaatgtgctt

SEQ ID NO: 2068 - DNA, 21 bp, synthetic construct
  source 1..21: mol_type = other DNA
  misc_feature 1..19: note = RNA
  misc_feature 20..21: note = DNA
ggcaatgtgactgctgacctt

SEQ ID NO: 2069 - DNA, 21 bp, synthetic construct
  source 1..21: mol_type = other DNA
  misc_feature 1..19: note = RNA
  misc_feature 20..21: note = DNA
caatgtgactgctgacaactt

SEQ ID NO: 2070 - DNA, 21 bp, synthetic construct
  source 1..21: mol_type = other DNA
  misc_feature 1..19: note = RNA
  misc_feature 20..21: note = DNA
ctgacaaagatggtgtggctt

SEQ ID NO: 2071 - DNA, 21 bp, synthetic construct
  source 1..21: mol_type = other DNA
  misc_feature 1..19: note = RNA
  misc_feature 20..21: note = DNA
tgacaaagatggtgtggcctt

SEQ ID NO: 2072 - DNA, 21 bp, synthetic construct
  source 1..21: mol_type = other DNA
  misc_feature 1..19: note = RNA
  misc_feature 20..21: note = DNA
ctcaggagaccattgcatctt

SEQ ID NO: 2073 - DNA, 21 bp, synthetic construct
  source 1..21: mol_type = other DNA
  misc_feature 1..19: note = RNA
  misc_feature 20..21: note = DNA
tcaggagaccattgcatcctt

SEQ ID NO: 2074 - DNA, 21 bp, synthetic construct
  source 1..21: mol_type = other DNA
  misc_feature 1..19: note = RNA
  misc_feature 20..21: note = DNA
agaccattgcatcattggctt

SEQ ID NO: 2075 - DNA, 21 bp, synthetic construct
  source 1..21: mol_type = other DNA
  misc_feature 1..19: note = RNA
  misc_feature 20..21: note = DNA
gaccattgcatcattggcctt

SEQ ID NO: 2076 - DNA, 21 bp, synthetic construct
  source 1..21: mol_type = other DNA
  misc_feature 1..19: note = RNA
  misc_feature 20..21: note = DNA
attgcatcattggccgcactt

SEQ ID NO: 2077 - DNA, 21 bp, synthetic construct
  source 1..21: mol_type = other DNA
  misc_feature 1..19: note = RNA
  misc_feature 20..21: note = DNA
cattggccgcacactggtctt

SEQ ID NO: 2078 - DNA, 21 bp, synthetic construct
  source 1..21: mol_type = other DNA
  misc_feature 1..19: note = RNA
  misc_feature 20..21: note = DNA
cgcacactggtggtccatctt

SEQ ID NO: 2079 - DNA, 21 bp, synthetic construct
  source 1..21: mol_type = other DNA
  misc_feature 1..19: note = RNA
  misc_feature 20..21: note = DNA
cacactggtggtccatgactt

SEQ ID NO: 2080 - DNA, 21 bp, synthetic construct
  source 1..21: mol_type = other DNA
  misc_feature 1..19: note = RNA
  misc_feature 20..21: note = DNA
acactggtggtccatgaactt

SEQ ID NO: 2081 - DNA, 21 bp, synthetic construct
  source 1..21: mol_type = other DNA
  misc_feature 1..19: note = RNA
  misc_feature 20..21: note = DNA
tggtggtccatgaaaaagctt

SEQ ID NO: 2082 - DNA, 21 bp, synthetic construct
  source 1..21: mol_type = other DNA
  misc_feature 1..19: note = RNA
  misc_feature 20..21: note = DNA
tggtccatgaaaaagcagctt

SEQ ID NO: 2083 - DNA, 21 bp, synthetic construct
  source 1..21: mol_type = other DNA
  misc_feature 1..19: note = RNA
  misc_feature 20..21: note = DNA
aaagcagatgacttgggcctt

SEQ ID NO: 2084 - DNA, 21 bp, synthetic construct
  source 1..21: mol_type = other DNA
  misc_feature 1..19: note = RNA
  misc_feature 20..21: note = DNA
gcagatgacttgggcaaactt

SEQ ID NO: 2085 - DNA, 21 bp, synthetic construct
  source 1..21: mol_type = other DNA
  misc_feature 1..19: note = RNA
  misc_feature 20..21: note = DNA
atgacttgggcaaaggtgctt

SEQ ID NO: 2086 - DNA, 21 bp, synthetic construct
  source 1..21: mol_type = other DNA
  misc_feature 1..19: note = RNA
  misc_feature 20..21: note = DNA
tgacttgggcaaaggtggctt

SEQ ID NO: 2087 - DNA, 21 bp, synthetic construct
  source 1..21: mol_type = other DNA
  misc_feature 1..19: note = RNA
  misc_feature 20..21: note = DNA
gacttgggcaaaggtggactt

SEQ ID NO: 2088 - DNA, 21 bp, synthetic construct
  source 1..21: mol_type = other DNA
  misc_feature 1..19: note = RNA
  misc_feature 20..21: note = DNA
gtacaaagacaggaaacgctt

SEQ ID NO: 2089 - DNA, 21 bp, synthetic construct
  source 1..21: mol_type = other DNA
  misc_feature 1..19: note = RNA
  misc_feature 20..21: note = DNA
acaaagacaggaaacgctctt

SEQ ID NO: 2090 - DNA, 21 bp, synthetic construct
  source 1..21: mol_type = other DNA
  misc_feature 1..19: note = RNA
  misc_feature 20..21: note = DNA
caaagacaggaaacgctgctt

SEQ ID NO: 2091 - DNA, 21 bp, synthetic construct
  source 1..21: mol_type = other DNA
  misc_feature 1..19: note = RNA
  misc_feature 20..21: note = DNA
aggaaacgctggaagtcgctt

SEQ ID NO: 2092 - DNA, 21 bp, synthetic construct
  source 1..21: mol_type = other DNA
  misc_feature 1..19: note = RNA
  misc_feature 20..21: note = DNA
gtcgtttggcttgtggtgctt

SEQ ID NO: 2093 - DNA, 21 bp, synthetic construct
  source 1..21: mol_type = other DNA
  misc_feature 1..19: note = RNA
  misc_feature 20..21: note = DNA
tcgtttggcttgtggtgtctt

SEQ ID NO: 2094 - DNA, 21 bp, synthetic construct
  source 1..21: mol_type = other DNA
  misc_feature 1..19: note = RNA
  misc_feature 20..21: note = DNA
cgtttggcttgtggtgtactt

SEQ ID NO: 2095 - DNA, 21 bp, synthetic construct
  source 1..21: mol_type = other DNA
  misc_feature 1..19: note = RNA
  misc_feature 20..21: note = DNA
gtttggcttgtggtgtaactt

SEQ ID NO: 2096 - DNA, 21 bp, synthetic construct
  source 1..21: mol_type = other DNA
  misc_feature 1..19: note = RNA
  misc_feature 20..21: note = DNA
ttggcttgtggtgtaattctt

SEQ ID NO: 2097 - DNA, 21 bp, synthetic construct
  source 1..21: mol_type = other DNA
  misc_feature 1..19: note = RNA
  misc_feature 20..21: note = DNA
ggcttgtggtgtaattggctt

SEQ ID NO: 2098 - DNA, 21 bp, synthetic construct
  source 1..21: mol_type = other DNA
  misc_feature 1..19: note = RNA
  misc_feature 20..21: note = DNA
gcttgtggtgtaattgggctt

SEQ ID NO: 2099 - DNA, 21 bp, synthetic construct
  source 1..21: mol_type = other DNA
  misc_feature 1..19: note = RNA
  misc_feature 20..21: note = DNA
cttgtggtgtaattgggactt

SEQ ID NO: 2100 - DNA, 21 bp, synthetic construct
  source 1..21: mol_type = other DNA
  misc_feature 1..19: note = RNA
  misc_feature 20..21: note = DNA
tgtggtgtaattgggatcctt

SEQ ID NO: 2101 - DNA, 21 bp, synthetic construct
  source 1..21: mol_type = other DNA
  misc_feature 1..19: note = RNA
  misc_feature 20..21: note = DNA
gtggtgtaattgggatcgctt

SEQ ID NO: 2102 - DNA, 21 bp, synthetic construct
  source 1..21: mol_type = other DNA
  misc_feature 1..19: note = RNA
  misc_feature 20..21: note = DNA
tggtgtaattgggatcgcctt

SEQ ID NO: 2103 - DNA, 21 bp, synthetic construct
  source 1..21: mol_type = other DNA
  misc_feature 1..19: note = RNA
  misc_feature 20..21: note = DNA
gtaattgggatcgcccaactt

SEQ ID NO: 2104 - DNA, 21 bp, synthetic construct
  source 1..21: mol_type = other DNA
  misc_feature 1..19: note = RNA
  misc_feature 20..21: note = DNA
taattgggatcgcccaatctt

SEQ ID NO: 2105 - DNA, 21 bp, synthetic construct
  source 1..21: mol_type = other DNA
  misc_feature 1..19: note = RNA
  misc_feature 20..21: note = DNA
aattgggatcgcccaatactt

SEQ ID NO: 2106 - DNA, 21 bp, synthetic construct
  source 1..21: mol_type = other DNA
  misc_feature 1..19: note = RNA
  misc_feature 20..21: note = DNA
attgggatcgcccaataactt

SEQ ID NO: 2107 - DNA, 21 bp, synthetic construct
  source 1..21: mol_type = other DNA
  misc_feature 1..19: note = RNA
  misc_feature 20..21: note = DNA
ttgggatcgcccaataaactt

SEQ ID NO: 2108 - DNA, 21 bp, synthetic construct
  source 1..21: mol_type = other DNA
  misc_feature 1..19: note = RNA
  misc_feature 20..21: note = DNA
tgggatcgcccaataaacctt

SEQ ID NO: 2109 - DNA, 21 bp, synthetic construct
  source 1..21: mol_type = other DNA
  misc_feature 1..19: note = RNA
  misc_feature 20..21: note = DNA
gggatcgcccaataaacactt

SEQ ID NO: 2110 - DNA, 21 bp, synthetic construct
  source 1..21: mol_type = other DNA
  misc_feature 1..19: note = RNA
  misc_feature 20..21: note = DNA
atcgcccaataaacattcctt

SEQ ID NO: 2111 - DNA, 21 bp, synthetic construct
  source 1..21: mol_type = other DNA
  misc_feature 1..19: note = RNA
  misc_feature 20..21: note = DNA
ccaataaacattcccttgctt

SEQ ID NO: 2112 - DNA, 21 bp, synthetic construct
  source 1..21: mol_type = other DNA
  misc_feature 1..19: note = RNA
  misc_feature 20..21: note = DNA
caataaacattcccttggctt

SEQ ID NO: 2113 - DNA, 21 bp, synthetic construct
  source 1..21: mol_type = other DNA
  misc_feature 1..19: note = RNA
  misc_feature 20..21: note = DNA
aataaacattcccttggactt

SEQ ID NO: 2114 - DNA, 21 bp, synthetic construct
  source 1..21: mol_type = other DNA
  misc_feature 1..19: note = RNA
  misc_feature 20..21: note = DNA
ataaacattcccttggatctt

SEQ ID NO: 2115 - DNA, 21 bp, synthetic construct
  source 1..21: mol_type = other DNA
  misc_feature 1..19: note = RNA
  misc_feature 20..21: note = DNA
taaacattcccttggatgctt

SEQ ID NO: 2116 - DNA, 21 bp, synthetic construct
  source 1..21: mol_type = other DNA
  misc_feature 1..19: note = RNA
  misc_feature 20..21: note = DNA
aaacattcccttggatgtctt

SEQ ID NO: 2117 - DNA, 21 bp, synthetic construct
  source 1..21: mol_type = other DNA
  misc_feature 1..19: note = RNA
  misc_feature 20..21: note = DNA
aacattcccttggatgtactt

SEQ ID NO: 2118 - DNA, 21 bp, synthetic construct
  source 1..21: mol_type = other DNA
  misc_feature 1..19: note = RNA
  misc_feature 20..21: note = DNA
attcccttggatgtagtcctt

SEQ ID NO: 2119 - DNA, 21 bp, synthetic construct
  source 1..21: mol_type = other DNA
  misc_feature 1..19: note = RNA
  misc_feature 20..21: note = DNA
cttggatgtagtctgaggctt

SEQ ID NO: 2120 - DNA, 21 bp, synthetic construct
  source 1..21: mol_type = other DNA
  misc_feature 1..19: note = RNA
  misc_feature 20..21: note = DNA
ctgaggccccttaactcactt

SEQ ID NO: 2121 - DNA, 21 bp, synthetic construct
  source 1..21: mol_type = other DNA
  misc_feature 1..19: note = RNA
  misc_feature 20..21: note = DNA
gaggccccttaactcatcctt

SEQ ID NO: 2122 - DNA, 21 bp, synthetic construct
  source 1..21: mol_type = other DNA
  misc_feature 1..19: note = RNA
  misc_feature 20..21: note = DNA
aggccccttaactcatctctt

SEQ ID NO: 2123 - DNA, 21 bp, synthetic construct
  source 1..21: mol_type = other DNA
  misc_feature 1..19: note = RNA
  misc_feature 20..21: note = DNA
ccccttaactcatctgttctt

SEQ ID NO: 2124 - DNA, 21 bp, synthetic construct
  source 1..21: mol_type = other DNA
  misc_feature 1..19: note = RNA
  misc_feature 20..21: note = DNA
cccttaactcatctgttactt

SEQ ID NO: 2125 - DNA, 21 bp, synthetic construct
  source 1..21: mol_type = other DNA
  misc_feature 1..19: note = RNA
  misc_feature 20..21: note = DNA
ccttaactcatctgttatctt

SEQ ID NO: 2126 - DNA, 21 bp, synthetic construct
  source 1..21: mol_type = other DNA
  misc_feature 1..19: note = RNA
  misc_feature 20..21: note = DNA
cttaactcatctgttatcctt

SEQ ID NO: 2127 - DNA, 21 bp, synthetic construct
  source 1..21: mol_type = other DNA
  misc_feature 1..19: note = RNA
  misc_feature 20..21: note = DNA
ttaactcatctgttatccctt

SEQ ID NO: 2128 - DNA, 21 bp, synthetic construct
  source 1..21: mol_type = other DNA
  misc_feature 1..19: note = RNA
  misc_feature 20..21: note = DNA
taactcatctgttatcctctt

SEQ ID NO: 2129 - DNA, 21 bp, synthetic construct
  source 1..21: mol_type = other DNA
  misc_feature 1..19: note = RNA
  misc_feature 20..21: note = DNA
aactcatctgttatcctgctt

SEQ ID NO: 2130 - DNA, 21 bp, synthetic construct
  source 1..21: mol_type = other DNA
  misc_feature 1..19: note = RNA
  misc_feature 20..21: note = DNA
gttatcctgctagctgtactt

SEQ ID NO: 2131 - DNA, 21 bp, synthetic construct
  source 1..21: mol_type = other DNA
  misc_feature 1..19: note = RNA
  misc_feature 20..21: note = DNA
ctgctagctgtagaaatgctt

SEQ ID NO: 2132 - DNA, 21 bp, synthetic construct
  source 1..21: mol_type = other DNA
  misc_feature 1..19: note = RNA
  misc_feature 20..21: note = DNA
tgctagctgtagaaatgtctt

SEQ ID NO: 2133 - DNA, 21 bp, synthetic construct
  source 1..21: mol_type = other DNA
  misc_feature 1..19: note = RNA
  misc_feature 20..21: note = DNA
gctgtagaaatgtatcctctt

SEQ ID NO: 2134 - DNA, 21 bp, synthetic construct
  source 1..21: mol_type = other DNA
  misc_feature 1..19: note = RNA
  misc_feature 20..21: note = DNA
ctgtagaaatgtatcctgctt

SEQ ID NO: 2135 - DNA, 21 bp, synthetic construct
  source 1..21: mol_type = other DNA
  misc_feature 1..19: note = RNA
  misc_feature 20..21: note = DNA
tgtagaaatgtatcctgactt

SEQ ID NO: 2136 - DNA, 21 bp, synthetic construct
  source 1..21: mol_type = other DNA
  misc_feature 1..19: note = RNA
  misc_feature 20..21: note = DNA
gtagaaatgtatcctgatctt

SEQ ID NO: 2137 - DNA, 21 bp, synthetic construct
  source 1..21: mol_type = other DNA
  misc_feature 1..19: note = RNA
  misc_feature 20..21: note = DNA
aaatgtatcctgataaacctt

SEQ ID NO: 2138 - DNA, 21 bp, synthetic construct
  source 1..21: mol_type = other DNA
  misc_feature 1..19: note = RNA
  misc_feature 20..21: note = DNA
gtatcctgataaacattactt

SEQ ID NO: 2139 - DNA, 21 bp, synthetic construct
  source 1..21: mol_type = other DNA
  misc_feature 1..19: note = RNA
  misc_feature 20..21: note = DNA
ttaaacactgtaatcttactt

SEQ ID NO: 2140 - DNA, 21 bp, synthetic construct
  source 1..21: mol_type = other DNA
  misc_feature 1..19: note = RNA
  misc_feature 20..21: note = DNA
actgtaatcttaaaagtgctt

SEQ ID NO: 2141 - DNA, 21 bp, synthetic construct
  source 1..21: mol_type = other DNA
  misc_feature 1..19: note = RNA
  misc_feature 20..21: note = DNA
ctgtaatcttaaaagtgtctt

SEQ ID NO: 2142 - DNA, 21 bp, synthetic construct
  source 1..21: mol_type = other DNA
  misc_feature 1..19: note = RNA
  misc_feature 20..21: note = DNA
tgtaatcttaaaagtgtactt

SEQ ID NO: 2143 - DNA, 21 bp, synthetic construct
  source 1..21: mol_type = other DNA
  misc_feature 1..19: note = RNA
  misc_feature 20..21: note = DNA
gtaatcttaaaagtgtaactt

SEQ ID NO: 2144 - DNA, 21 bp, synthetic construct
  source 1..21: mol_type = other DNA
  misc_feature 1..19: note = RNA
  misc_feature 20..21: note = DNA
cttaaaagtgtaattgtgctt

SEQ ID NO: 2145 - DNA, 21 bp, synthetic construct
  source 1..21: mol_type = other DNA
  misc_feature 1..19: note = RNA
  misc_feature 20..21: note = DNA
tacctgtagtgagaaactctt

SEQ ID NO: 2146 - DNA, 21 bp, synthetic construct
  source 1..21: mol_type = other DNA
  misc_feature 1..19: note = RNA
  misc_feature 20..21: note = DNA
ttatgatcacttggaagactt

SEQ ID NO: 2147 - DNA, 21 bp, synthetic construct
  source 1..21: mol_type = other DNA
  misc_feature 1..19: note = RNA
  misc_feature 20..21: note = DNA
atgatcacttggaagattctt

SEQ ID NO: 2148 - DNA, 21 bp, synthetic construct
  source 1..21: mol_type = other DNA
  misc_feature 1..19: note = RNA
  misc_feature 20..21: note = DNA
atcacttggaagatttgtctt

SEQ ID NO: 2149 - DNA, 21 bp, synthetic construct
  source 1..21: mol_type = other DNA
  misc_feature 1..19: note = RNA
  misc_feature 20..21: note = DNA
tggaagatttgtatagttctt

SEQ ID NO: 2150 - DNA, 21 bp, synthetic construct
  source 1..21: mol_type = other DNA
  misc_feature 1..19: note = RNA
  misc_feature 20..21: note = DNA
tataaaactcagttaaaactt

SEQ ID NO: 2151 - DNA, 21 bp, synthetic construct
  source 1..21: mol_type = other DNA
  misc_feature 1..19: note = RNA
  misc_feature 20..21: note = DNA
aaactcagttaaaatgtcctt

SEQ ID NO: 2152 - DNA, 21 bp, synthetic construct
  source 1..21: mol_type = other DNA
  misc_feature 1..19: note = RNA
  misc_feature 20..21: note = DNA
gtctgtttcaatgacctgctt

SEQ ID NO: 2153 - DNA, 21 bp, synthetic construct
  source 1..21: mol_type = other DNA
  misc_feature 1..19: note = RNA
  misc_feature 20..21: note = DNA
atgacctgtattttgccactt

SEQ ID NO: 2154 - DNA, 21 bp, synthetic construct
  source 1..21: mol_type = other DNA
  misc_feature 1..19: note = RNA
  misc_feature 20..21: note = DNA
acctgtattttgccagacctt

SEQ ID NO: 2155 - DNA, 21 bp, synthetic construct
  source 1..21: mol_type = other DNA
  misc_feature 1..19: note = RNA
  misc_feature 20..21: note = DNA
cctgtattttgccagactctt

SEQ ID NO: 2156 - DNA, 21 bp, synthetic construct
  source 1..21: mol_type = other DNA
  misc_feature 1..19: note = RNA
  misc_feature 20..21: note = DNA
taaatcacagatgggtatctt

SEQ ID NO: 2157 - DNA, 21 bp, synthetic construct
  source 1..21: mol_type = other DNA
  misc_feature 1..19: note = RNA
  misc_feature 20..21: note = DNA
atcacagatgggtattaactt

SEQ ID NO: 2158 - DNA, 21 bp, synthetic construct
  source 1..21: mol_type = other DNA
  misc_feature 1..19: note = RNA
  misc_feature 20..21: note = DNA
tcacagatgggtattaaactt

SEQ ID NO: 2159 - DNA, 21 bp, synthetic construct
  source 1..21: mol_type = other DNA
  misc_feature 1..19: note = RNA
  misc_feature 20..21: note = DNA
acagatgggtattaaactctt

SEQ ID NO: 2160 - DNA, 21 bp, synthetic construct
  source 1..21: mol_type = other DNA
  misc_feature 1..19: note = RNA
  misc_feature 20..21: note = DNA
cagatgggtattaaacttctt

SEQ ID NO: 2161 - DNA, 21 bp, synthetic construct
  source 1..21: mol_type = other DNA
  misc_feature 1..19: note = RNA
  misc_feature 20..21: note = DNA
agatgggtattaaacttgctt

SEQ ID NO: 2162 - DNA, 21 bp, synthetic construct
  source 1..21: mol_type = other DNA
  misc_feature 1..19: note = RNA
  misc_feature 20..21: note = DNA
atgggtattaaacttgtcctt

SEQ ID NO: 2163 - DNA, 21 bp, synthetic construct
  source 1..21: mol_type = other DNA
  misc_feature 1..19: note = RNA
  misc_feature 20..21: note = DNA
taaacttgtcagaatttcctt

SEQ ID NO: 2164 - DNA, 21 bp, synthetic construct
  source 1..21: mol_type = other DNA
  misc_feature 1..19: note = RNA
  misc_feature 20..21: note = DNA
tcattcaagcctgtgaatctt

SEQ ID NO: 2165 - DNA, 21 bp, synthetic construct
  source 1..21: mol_type = other DNA
  misc_feature 1..19: note = RNA
  misc_feature 20..21: note = DNA
cattcaagcctgtgaatactt

SEQ ID NO: 2166 - DNA, 21 bp, synthetic construct
  source 1..21: mol_type = other DNA
  misc_feature 1..19: note = RNA
  misc_feature 20..21: note = DNA
aataaaaaccctgtatggctt

SEQ ID NO: 2167 - DNA, 21 bp, synthetic construct
  source 1..21: mol_type = other DNA
  misc_feature 1..19: note = RNA
  misc_feature 20..21: note = DNA
ataaaaaccctgtatggcctt

SEQ ID NO: 2168 - DNA, 21 bp, synthetic construct
  source 1..21: mol_type = other DNA
  misc_feature 1..19: note = RNA
  misc_feature 20..21: note = DNA
aaccctgtatggcacttactt

SEQ ID NO: 2169 - DNA, 21 bp, synthetic construct
  source 1..21: mol_type = other DNA
  misc_feature 1..19: note = RNA
  misc_feature 20..21: note = DNA
accctgtatggcacttatctt

SEQ ID NO: 2170 - DNA, 21 bp, synthetic construct
  source 1..21: mol_type = other DNA
  misc_feature 1..19: note = RNA
  misc_feature 20..21: note = DNA
gaggctattaaaagaatcctt

SEQ ID NO: 2171 - DNA, 21 bp, synthetic construct
  source 1..21: mol_type = other DNA
  misc_feature 1..19: note = RNA
  misc_feature 20..21: note = DNA
aaagaatccaaattcaaactt

SEQ ID NO: 2172 - DNA, 21 bp, synthetic construct
  source 1..21: mol_type = other DNA
  misc_feature 1..19: note = RNA
  misc_feature 20..21: note = DNA
gaatccaaattcaaactactt

SEQ ID NO: 2173 - DNA, 21 bp, synthetic construct
  source 1..21: mol_type = other DNA
  misc_feature 1..19: note = RNA
  misc_feature 20..21: note = DNA
tttataggccagacctccgtt

SEQ ID NO: 2174 - DNA, 21 bp, synthetic construct
  source 1..21: mol_type = other DNA
  misc_feature 1..19: note = RNA
  misc_feature 20..21: note = DNA
ttttataggccagacctcctt

SEQ ID NO: 2175 - DNA, 21 bp, synthetic construct
  source 1..21: mol_type = other DNA
  misc_feature 1..19: note = RNA
  misc_feature 20..21: note = DNA
tctttataggccagacctctt

SEQ ID NO: 2176 - DNA, 21 bp, synthetic construct
  source 1..21: mol_type = other DNA
  misc_feature 1..19: note = RNA
  misc_feature 20..21: note = DNA
tactttataggccagaccttt

SEQ ID NO: 2177 - DNA, 21 bp, synthetic construct
  source 1..21: mol_type = other DNA
  misc_feature 1..19: note = RNA
  misc_feature 20..21: note = DNA
ttactttataggccagacctt

SEQ ID NO: 2178 - DNA, 21 bp, synthetic construct
  source 1..21: mol_type = other DNA
  misc_feature 1..19: note = RNA
  misc_feature 20..21: note = DNA
tactactttataggccagatt

SEQ ID NO: 2179 - DNA, 21 bp, synthetic construct
  source 1..21: mol_type = other DNA
  misc_feature 1..19: note = RNA
  misc_feature 20..21: note = DNA
tgactactttataggccagtt

SEQ ID NO: 2180 - DNA, 21 bp, synthetic construct
  source 1..21: mol_type = other DNA
  misc_feature 1..19: note = RNA
  misc_feature 20..21: note = DNA
tcgactactttataggccatt

SEQ ID NO: 2181 - DNA, 21 bp, synthetic construct
  source 1..21: mol_type = other DNA
  misc_feature 1..19: note = RNA
  misc_feature 20..21: note = DNA
tgcgactactttataggcctt

SEQ ID NO: 2182 - DNA, 21 bp, synthetic construct
  source 1..21: mol_type = other DNA
  misc_feature 1..19: note = RNA
  misc_feature 20..21: note = DNA
tcgcgactactttataggctt

SEQ ID NO: 2183 - DNA, 21 bp, synthetic construct
  source 1..21: mol_type = other DNA
  misc_feature 1..19: note = RNA
  misc_feature 20..21: note = DNA
tccgcgactactttataggtt

SEQ ID NO: 2184 - DNA, 21 bp, synthetic construct
  source 1..21: mol_type = other DNA
  misc_feature 1..19: note = RNA
  misc_feature 20..21: note = DNA
tgctgcaggagactacgactt

SEQ ID NO: 2185 - DNA, 21 bp, synthetic construct
  source 1..21: mol_type = other DNA
  misc_feature 1..19: note = RNA
  misc_feature 20..21: note = DNA
tacgctgcaggagactacgtt

SEQ ID NO: 2186 - DNA, 21 bp, synthetic construct
  source 1..21: mol_type = other DNA
  misc_feature 1..19: note = RNA
  misc_feature 20..21: note = DNA
tgacgctgcaggagactactt

SEQ ID NO: 2187 - DNA, 21 bp, synthetic construct
  source 1..21: mol_type = other DNA
  misc_feature 1..19: note = RNA
  misc_feature 20..21: note = DNA
tagacgctgcaggagactatt

SEQ ID NO: 2188 - DNA, 21 bp, synthetic construct
  source 1..21: mol_type = other DNA
  misc_feature 1..19: note = RNA
  misc_feature 20..21: note = DNA
tcacggccttcgtcgccattt

SEQ ID NO: 2189 - DNA, 21 bp, synthetic construct
  source 1..21: mol_type = other DNA
  misc_feature 1..19: note = RNA
  misc_feature 20..21: note = DNA
tcgcacacggccttcgtcgtt

SEQ ID NO: 2190 - DNA, 21 bp, synthetic construct
  source 1..21: mol_type = other DNA
  misc_feature 1..19: note = RNA
  misc_feature 20..21: note = DNA
tagcacgcacacggccttctt

SEQ ID NO: 2191 - DNA, 21 bp, synthetic construct
  source 1..21: mol_type = other DNA
  misc_feature 1..19: note = RNA
  misc_feature 20..21: note = DNA
tttcagcacgcacacggcctt

SEQ ID NO: 2192 - DNA, 21 bp, synthetic construct
  source 1..21: mol_type = other DNA
  misc_feature 1..19: note = RNA
  misc_feature 20..21: note = DNA
tgcactgggccgtcgcccttt

SEQ ID NO: 2193 - DNA, 21 bp, synthetic construct
  source 1..21: mol_type = other DNA
  misc_feature 1..19: note = RNA
  misc_feature 20..21: note = DNA
taattgatgatgccctgcatt

SEQ ID NO: 2194 - DNA, 21 bp, synthetic construct
  source 1..21: mol_type = other DNA
  misc_feature 1..19: note = RNA
  misc_feature 20..21: note = DNA
taaattgatgatgccctgctt

SEQ ID NO: 2195 - DNA, 21 bp, synthetic construct
  source 1..21: mol_type = other DNA
  misc_feature 1..19: note = RNA
  misc_feature 20..21: note = DNA
tcgaaattgatgatgcccttt

SEQ ID NO: 2196 - DNA, 21 bp, synthetic construct
  source 1..21: mol_type = other DNA
  misc_feature 1..19: note = RNA
  misc_feature 20..21: note = DNA
ttcgaaattgatgatgccctt

SEQ ID NO: 2197 - DNA, 21 bp, synthetic construct
  source 1..21: mol_type = other DNA
  misc_feature 1..19: note = RNA
  misc_feature 20..21: note = DNA
tctcgaaattgatgatgcctt

SEQ ID NO: 2198 - DNA, 21 bp, synthetic construct
  source 1..21: mol_type = other DNA
  misc_feature 1..19: note = RNA
  misc_feature 20..21: note = DNA
tgctcgaaattgatgatgctt

SEQ ID NO: 2199 - DNA, 21 bp, synthetic construct
  source 1..21: mol_type = other DNA
  misc_feature 1..19: note = RNA
  misc_feature 20..21: note = DNA
ttgctcgaaattgatgatgtt

SEQ ID NO: 2200 - DNA, 21 bp, synthetic construct
  source 1..21: mol_type = other DNA
  misc_feature 1..19: note = RNA
  misc_feature 20..21: note = DNA
tttccttctgctcgaaatttt

SEQ ID NO: 2201 - DNA, 21 bp, synthetic construct
  source 1..21: mol_type = other DNA
  misc_feature 1..19: note = RNA
  misc_feature 20..21: note = DNA
tactttccttctgctcgaatt

SEQ ID NO: 2202 - DNA, 21 bp, synthetic construct
  source 1..21: mol_type = other DNA
  misc_feature 1..19: note = RNA
  misc_feature 20..21: note = DNA
ttactttccttctgctcgatt

SEQ ID NO: 2203 - DNA, 21 bp, synthetic construct
  source 1..21: mol_type = other DNA
  misc_feature 1..19: note = RNA
  misc_feature 20..21: note = DNA
taatgcttccccacacctttt

SEQ ID NO: 2204 - DNA, 21 bp, synthetic construct
  source 1..21: mol_type = other DNA
  misc_feature 1..19: note = RNA
  misc_feature 20..21: note = DNA
tttaatgcttccccacacctt

SEQ ID NO: 2205 - DNA, 21 bp, synthetic construct
  source 1..21: mol_type = other DNA
  misc_feature 1..19: note = RNA
  misc_feature 20..21: note = DNA
tgcaggccttcagtcagtctt

SEQ ID NO: 2206 - DNA, 21 bp, synthetic construct
  source 1..21: mol_type = other DNA
  misc_feature 1..19: note = RNA
  misc_feature 20..21: note = DNA
tatgcaggccttcagtcagtt

SEQ ID NO: 2207 - DNA, 21 bp, synthetic construct
  source 1..21: mol_type = other DNA
  misc_feature 1..19: note = RNA
  misc_feature 20..21: note = DNA
tcatgcaggccttcagtcatt

SEQ ID NO: 2208 - DNA, 21 bp, synthetic construct
  source 1..21: mol_type = other DNA
  misc_feature 1..19: note = RNA
  misc_feature 20..21: note = DNA
taatccatgcaggccttcatt

SEQ ID NO: 2209 - DNA, 21 bp, synthetic construct
  source 1..21: mol_type = other DNA
  misc_feature 1..19: note = RNA
  misc_feature 20..21: note = DNA
tgaatccatgcaggccttctt

SEQ ID NO: 2210 - DNA, 21 bp, synthetic construct
  source 1..21: mol_type = other DNA
  misc_feature 1..19: note = RNA
  misc_feature 20..21: note = DNA
tgaacatggaatccatgcatt

SEQ ID NO: 2211 - DNA, 21 bp, synthetic construct
  source 1..21: mol_type = other DNA
  misc_feature 1..19: note = RNA
  misc_feature 20..21: note = DNA
tatgaacatggaatccatgtt

SEQ ID NO: 2212 - DNA, 21 bp, synthetic construct
  source 1..21: mol_type = other DNA
  misc_feature 1..19: note = RNA
  misc_feature 20..21: note = DNA
tctcatgaacatggaatcctt

SEQ ID NO: 2213 - DNA, 21 bp, synthetic construct
  source 1..21: mol_type = other DNA
  misc_feature 1..19: note = RNA
  misc_feature 20..21: note = DNA
taaactcatgaacatggaatt

SEQ ID NO: 2214 - DNA, 21 bp, synthetic construct
  source 1..21: mol_type = other DNA
  misc_feature 1..19: note = RNA
  misc_feature 20..21: note = DNA
tatctccaaactcatgaactt

SEQ ID NO: 2215 - DNA, 21 bp, synthetic construct
  source 1..21: mol_type = other DNA
  misc_feature 1..19: note = RNA
  misc_feature 20..21: note = DNA
ttatctccaaactcatgaatt

SEQ ID NO: 2216 - DNA, 21 bp, synthetic construct
  source 1..21: mol_type = other DNA
  misc_feature 1..19: note = RNA
  misc_feature 20..21: note = DNA
tgtattatctccaaactcatt

SEQ ID NO: 2217 - DNA, 21 bp, synthetic construct
  source 1..21: mol_type = other DNA
  misc_feature 1..19: note = RNA
  misc_feature 20..21: note = DNA
ttgtattatctccaaactctt

SEQ ID NO: 2218 - DNA, 21 bp, synthetic construct
  source 1..21: mol_type = other DNA
  misc_feature 1..19: note = RNA
  misc_feature 20..21: note = DNA
tcctgcactggtacagccttt

SEQ ID NO: 2219 - DNA, 21 bp, synthetic construct
  source 1..21: mol_type = other DNA
  misc_feature 1..19: note = RNA
  misc_feature 20..21: note = DNA
tacctgcactggtacagcctt

SEQ ID NO: 2220 - DNA, 21 bp, synthetic construct
  source 1..21: mol_type = other DNA
  misc_feature 1..19: note = RNA
  misc_feature 20..21: note = DNA
tattaaagtgaggacctgctt

SEQ ID NO: 2221 - DNA, 21 bp, synthetic construct
  source 1..21: mol_type = other DNA
  misc_feature 1..19: note = RNA
  misc_feature 20..21: note = DNA
tgattaaagtgaggacctgtt

SEQ ID NO: 2222 - DNA, 21 bp, synthetic construct
  source 1..21: mol_type = other DNA
  misc_feature 1..19: note = RNA
  misc_feature 20..21: note = DNA
tgatagaggattaaagtgatt

SEQ ID NO: 2223 - DNA, 21 bp, synthetic construct
  source 1..21: mol_type = other DNA
  misc_feature 1..19: note = RNA
  misc_feature 20..21: note = DNA
taccgtgttttctggatagtt

SEQ ID NO: 2224 - DNA, 21 bp, synthetic construct
  source 1..21: mol_type = other DNA
  misc_feature 1..19: note = RNA
  misc_feature 20..21: note = DNA
tcaccgtgttttctggatatt

SEQ ID NO: 2225 - DNA, 21 bp, synthetic construct
  source 1..21: mol_type = other DNA
  misc_feature 1..19: note = RNA
  misc_feature 20..21: note = DNA
tccaccgtgttttctggattt

SEQ ID NO: 2226 - DNA, 21 bp, synthetic construct
  source 1..21: mol_type = other DNA
  misc_feature 1..19: note = RNA
  misc_feature 20..21: note = DNA
tgcccaccgtgttttctggtt

SEQ ID NO: 2227 - DNA, 21 bp, synthetic construct
  source 1..21: mol_type = other DNA
  misc_feature 1..19: note = RNA
  misc_feature 20..21: note = DNA
tttggcccaccgtgttttctt

SEQ ID NO: 2228 - DNA, 21 bp, synthetic construct
  source 1..21: mol_type = other DNA
  misc_feature 1..19: note = RNA
  misc_feature 20..21: note = DNA
ttttggcccaccgtgtttttt

SEQ ID NO: 2229 - DNA, 21 bp, synthetic construct
  source 1..21: mol_type = other DNA
  misc_feature 1..19: note = RNA
  misc_feature 20..21: note = DNA
ttcatcctttggcccaccgtt

SEQ ID NO: 2230 - DNA, 21 bp, synthetic construct
  source 1..21: mol_type = other DNA
  misc_feature 1..19: note = RNA
  misc_feature 20..21: note = DNA
tcatgcctctcttcatccttt

SEQ ID NO: 2231 - DNA, 21 bp, synthetic construct
  source 1..21: mol_type = other DNA
  misc_feature 1..19: note = RNA
  misc_feature 20..21: note = DNA
tcaacatgcctctcttcattt

SEQ ID NO: 2232 - DNA, 21 bp, synthetic construct
  source 1..21: mol_type = other DNA
  misc_feature 1..19: note = RNA
  misc_feature 20..21: note = DNA
tgtctccaacatgcctctctt

SEQ ID NO: 2233 - DNA, 21 bp, synthetic construct
  source 1..21: mol_type = other DNA
  misc_feature 1..19: note = RNA
  misc_feature 20..21: note = DNA
tagtctccaacatgcctcttt

SEQ ID NO: 2234 - DNA, 21 bp, synthetic construct
  source 1..21: mol_type = other DNA
  misc_feature 1..19: note = RNA
  misc_feature 20..21: note = DNA
ttgcccaagtctccaacattt

SEQ ID NO: 2235 - DNA, 21 bp, synthetic construct
  source 1..21: mol_type = other DNA
  misc_feature 1..19: note = RNA
  misc_feature 20..21: note = DNA
tattgcccaagtctccaactt

SEQ ID NO: 2236 - DNA, 21 bp, synthetic construct
  source 1..21: mol_type = other DNA
  misc_feature 1..19: note = RNA
  misc_feature 20..21: note = DNA
tcacattgcccaagtctcctt

SEQ ID NO: 2237 - DNA, 21 bp, synthetic construct
  source 1..21: mol_type = other DNA
  misc_feature 1..19: note = RNA
  misc_feature 20..21: note = DNA
tgtcagcagtcacattgcctt

SEQ ID NO: 2238 - DNA, 21 bp, synthetic construct
  source 1..21: mol_type = other DNA
  misc_feature 1..19: note = RNA
  misc_feature 20..21: note = DNA
tttgtcagcagtcacattgtt

SEQ ID NO: 2239 - DNA, 21 bp, synthetic construct
  source 1..21: mol_type = other DNA
  misc_feature 1..19: note = RNA
  misc_feature 20..21: note = DNA
tccacaccatctttgtcagtt

SEQ ID NO: 2240 - DNA, 21 bp, synthetic construct
  source 1..21: mol_type = other DNA
  misc_feature 1..19: note = RNA
  misc_feature 20..21: note = DNA
tgccacaccatctttgtcatt

SEQ ID NO: 2241 - DNA, 21 bp, synthetic construct
  source 1..21: mol_type = other DNA
  misc_feature 1..19: note = RNA
  misc_feature 20..21: note = DNA
tatgcaatggtctcctgagtt

SEQ ID NO: 2242 - DNA, 21 bp, synthetic construct
  source 1..21: mol_type = other DNA
  misc_feature 1..19: note = RNA
  misc_feature 20..21: note = DNA
tgatgcaatggtctcctgatt

SEQ ID NO: 2243 - DNA, 21 bp, synthetic construct
  source 1..21: mol_type = other DNA
  misc_feature 1..19: note = RNA
  misc_feature 20..21: note = DNA
tccaatgatgcaatggtcttt

SEQ ID NO: 2244 - DNA, 21 bp, synthetic construct
  source 1..21: mol_type = other DNA
  misc_feature 1..19: note = RNA
  misc_feature 20..21: note = DNA
tgccaatgatgcaatggtctt

SEQ ID NO: 2245 - DNA, 21 bp, synthetic construct
  source 1..21: mol_type = other DNA
  misc_feature 1..19: note = RNA
  misc_feature 20..21: note = DNA
ttgcggccaatgatgcaattt

SEQ ID NO: 2246 - DNA, 21 bp, synthetic construct
  source 1..21: mol_type = other DNA
  misc_feature 1..19: note = RNA
  misc_feature 20..21: note = DNA
taccagtgtgcggccaatgtt

SEQ ID NO: 2247 - DNA, 21 bp, synthetic construct
  source 1..21: mol_type = other DNA
  misc_feature 1..19: note = RNA
  misc_feature 20..21: note = DNA
tatggaccaccagtgtgcgtt

SEQ ID NO: 2248 - DNA, 21 bp, synthetic construct
  source 1..21: mol_type = other DNA
  misc_feature 1..19: note = RNA
  misc_feature 20..21: note = DNA
ttcatggaccaccagtgtgtt

SEQ ID NO: 2249 - DNA, 21 bp, synthetic construct
  source 1..21: mol_type = other DNA
  misc_feature 1..19: note = RNA
  misc_feature 20..21: note = DNA
tttcatggaccaccagtgttt

SEQ ID NO: 2250 - DNA, 21 bp, synthetic construct
  source 1..21: mol_type = other DNA
  misc_feature 1..19: note = RNA
  misc_feature 20..21: note = DNA
tctttttcatggaccaccatt

SEQ ID NO: 2251 - DNA, 21 bp, synthetic construct
  source 1..21: mol_type = other DNA
  misc_feature 1..19: note = RNA
  misc_feature 20..21: note = DNA
tctgctttttcatggaccatt

SEQ ID NO: 2252 - DNA, 21 bp, synthetic construct
  source 1..21: mol_type = other DNA
  misc_feature 1..19: note = RNA
  misc_feature 20..21: note = DNA
tgcccaagtcatctgcttttt

SEQ ID NO: 2253 - DNA, 21 bp, synthetic construct
  source 1..21: mol_type = other DNA
  misc_feature 1..19: note = RNA
  misc_feature 20..21: note = DNA
ttttgcccaagtcatctgctt

SEQ ID NO: 2254 - DNA, 21 bp, synthetic construct
  source 1..21: mol_type = other DNA
  misc_feature 1..19: note = RNA
  misc_feature 20..21: note = DNA
tcacctttgcccaagtcattt

SEQ ID NO: 2255 - DNA, 21 bp, synthetic construct
  source 1..21: mol_type = other DNA
  misc_feature 1..19: note = RNA
  misc_feature 20..21: note = DNA
tccacctttgcccaagtcatt

SEQ ID NO: 2256 - DNA, 21 bp, synthetic construct
  source 1..21: mol_type = other DNA
  misc_feature 1..19: note = RNA
  misc_feature 20..21: note = DNA
ttccacctttgcccaagtctt

SEQ ID NO: 2257 - DNA, 21 bp, synthetic construct
  source 1..21: mol_type = other DNA
  misc_feature 1..19: note = RNA
  misc_feature 20..21: note = DNA
tcgtttcctgtctttgtactt

SEQ ID NO: 2258 - DNA, 21 bp, synthetic construct
  source 1..21: mol_type = other DNA
  misc_feature 1..19: note = RNA
  misc_feature 20..21: note = DNA
tagcgtttcctgtctttgttt

SEQ ID NO: 2259 - DNA, 21 bp, synthetic construct
  source 1..21: mol_type = other DNA
  misc_feature 1..19: note = RNA
  misc_feature 20..21: note = DNA
tcagcgtttcctgtctttgtt

SEQ ID NO: 2260 - DNA, 21 bp, synthetic construct
  source 1..21: mol_type = other DNA
  misc_feature 1..19: note = RNA
  misc_feature 20..21: note = DNA
tcgacttccagcgtttccttt

SEQ ID NO: 2261 - DNA, 21 bp, synthetic construct
  source 1..21: mol_type = other DNA
  misc_feature 1..19: note = RNA
  misc_feature 20..21: note = DNA
tcaccacaagccaaacgactt

SEQ ID NO: 2262 - DNA, 21 bp, synthetic construct
  source 1..21: mol_type = other DNA
  misc_feature 1..19: note = RNA
  misc_feature 20..21: note = DNA
tacaccacaagccaaacgatt

SEQ ID NO: 2263 - DNA, 21 bp, synthetic construct
  source 1..21: mol_type = other DNA
  misc_feature 1..19: note = RNA
  misc_feature 20..21: note = DNA
ttacaccacaagccaaacgtt

SEQ ID NO: 2264 - DNA, 21 bp, synthetic construct
  source 1..21: mol_type = other DNA
  misc_feature 1..19: note = RNA
  misc_feature 20..21: note = DNA
tttacaccacaagccaaactt

SEQ ID NO: 2265 - DNA, 21 bp, synthetic construct
  source 1..21: mol_type = other DNA
  misc_feature 1..19: note = RNA
  misc_feature 20..21: note = DNA
taattacaccacaagccaatt

SEQ ID NO: 2266 - DNA, 21 bp, synthetic construct
  source 1..21: mol_type = other DNA
  misc_feature 1..19: note = RNA
  misc_feature 20..21: note = DNA
tccaattacaccacaagcctt

SEQ ID NO: 2267 - DNA, 21 bp, synthetic construct
  source 1..21: mol_type = other DNA
  misc_feature 1..19: note = RNA
  misc_feature 20..21: note = DNA
tcccaattacaccacaagctt

SEQ ID NO: 2268 - DNA, 21 bp, synthetic construct
  source 1..21: mol_type = other DNA
  misc_feature 1..19: note = RNA
  misc_feature 20..21: note = DNA
ttcccaattacaccacaagtt

SEQ ID NO: 2269 - DNA, 21 bp, synthetic construct
  source 1..21: mol_type = other DNA
  misc_feature 1..19: note = RNA
  misc_feature 20..21: note = DNA
tgatcccaattacaccacatt

SEQ ID NO: 2270 - DNA, 21 bp, synthetic construct
  source 1..21: mol_type = other DNA
  misc_feature 1..19: note = RNA
  misc_feature 20..21: note = DNA
tcgatcccaattacaccactt

SEQ ID NO: 2271 - DNA, 21 bp, synthetic construct
  source 1..21: mol_type = other DNA
  misc_feature 1..19: note = RNA
  misc_feature 20..21: note = DNA
tgcgatcccaattacaccatt

SEQ ID NO: 2272 - DNA, 21 bp, synthetic construct
  source 1..21: mol_type = other DNA
  misc_feature 1..19: note = RNA
  misc_feature 20..21: note = DNA
tttgggcgatcccaattactt

SEQ ID NO: 2273 - DNA, 21 bp, synthetic construct
  source 1..21: mol_type = other DNA
  misc_feature 1..19: note = RNA
  misc_feature 20..21: note = DNA
tattgggcgatcccaattatt

SEQ ID NO: 2274 - DNA, 21 bp, synthetic construct
  source 1..21: mol_type = other DNA
  misc_feature 1..19: note = RNA
  misc_feature 20..21: note = DNA
ttattgggcgatcccaatttt

SEQ ID NO: 2275 - DNA, 21 bp, synthetic construct
  source 1..21: mol_type = other DNA
  misc_feature 1..19: note = RNA
  misc_feature 20..21: note = DNA
tttattgggcgatcccaattt

SEQ ID NO: 2276 - DNA, 21 bp, synthetic construct
  source 1..21: mol_type = other DNA
  misc_feature 1..19: note = RNA
  misc_feature 20..21: note = DNA
ttttattgggcgatcccaatt

SEQ ID NO: 2277 - DNA, 21 bp, synthetic construct
  source 1..21: mol_type = other DNA
  misc_feature 1..19: note = RNA
  misc_feature 20..21: note = DNA
tgtttattgggcgatcccatt

SEQ ID NO: 2278 - DNA, 21 bp, synthetic construct
  source 1..21: mol_type = other DNA
  misc_feature 1..19: note = RNA
  misc_feature 20..21: note = DNA
ttgtttattgggcgatccctt

SEQ ID NO: 2279 - DNA, 21 bp, synthetic construct
  source 1..21: mol_type = other DNA
  misc_feature 1..19: note = RNA
  misc_feature 20..21: note = DNA
tgaatgtttattgggcgattt

SEQ ID NO: 2280 - DNA, 21 bp, synthetic construct
  source 1..21: mol_type = other DNA
  misc_feature 1..19: note = RNA
  misc_feature 20..21: note = DNA
tcaagggaatgtttattggtt

SEQ ID NO: 2281 - DNA, 21 bp, synthetic construct
  source 1..21: mol_type = other DNA
  misc_feature 1..19: note = RNA
  misc_feature 20..21: note = DNA
tccaagggaatgtttattgtt

SEQ ID NO: 2282 - DNA, 21 bp, synthetic construct
  source 1..21: mol_type = other DNA
  misc_feature 1..19: note = RNA
  misc_feature 20..21: note = DNA
ttccaagggaatgtttatttt

SEQ ID NO: 2283 - DNA, 21 bp, synthetic construct
  source 1..21: mol_type = other DNA
  misc_feature 1..19: note = RNA
  misc_feature 20..21: note = DNA
tatccaagggaatgtttattt

SEQ ID NO: 2284 - DNA, 21 bp, synthetic construct
  source 1..21: mol_type = other DNA
  misc_feature 1..19: note = RNA
  misc_feature 20..21: note = DNA
tcatccaagggaatgtttatt

SEQ ID NO: 2285 - DNA, 21 bp, synthetic construct
  source 1..21: mol_type = other DNA
  misc_feature 1..19: note = RNA
  misc_feature 20..21: note = DNA
tacatccaagggaatgttttt

SEQ ID NO: 2286 - DNA, 21 bp, synthetic construct
  source 1..21: mol_type = other DNA
  misc_feature 1..19: note = RNA
  misc_feature 20..21: note = DNA
ttacatccaagggaatgtttt

SEQ ID NO: 2287 - DNA, 21 bp, synthetic construct
  source 1..21: mol_type = other DNA
  misc_feature 1..19: note = RNA
  misc_feature 20..21: note = DNA
tgactacatccaagggaattt

SEQ ID NO: 2288 - DNA, 21 bp, synthetic construct
  source 1..21: mol_type = other DNA
  misc_feature 1..19: note = RNA
  misc_feature 20..21: note = DNA
tcctcagactacatccaagtt

SEQ ID NO: 2289 - DNA, 21 bp, synthetic construct
  source 1..21: mol_type = other DNA
  misc_feature 1..19: note = RNA
  misc_feature 20..21: note = DNA
ttgagttaaggggcctcagtt

SEQ ID NO: 2290 - DNA, 21 bp, synthetic construct
  source 1..21: mol_type = other DNA
  misc_feature 1..19: note = RNA
  misc_feature 20..21: note = DNA
tgatgagttaaggggcctctt

SEQ ID NO: 2291 - DNA, 21 bp, synthetic construct
  source 1..21: mol_type = other DNA
  misc_feature 1..19: note = RNA
  misc_feature 20..21: note = DNA
tagatgagttaaggggccttt

SEQ ID NO: 2292 - DNA, 21 bp, synthetic construct
  source 1..21: mol_type = other DNA
  misc_feature 1..19: note = RNA
  misc_feature 20..21: note = DNA
taacagatgagttaaggggtt

SEQ ID NO: 2293 - DNA, 21 bp, synthetic construct
  source 1..21: mol_type = other DNA
  misc_feature 1..19: note = RNA
  misc_feature 20..21: note = DNA
ttaacagatgagttaagggtt

SEQ ID NO: 2294 - DNA, 21 bp, synthetic construct
  source 1..21: mol_type = other DNA
  misc_feature 1..19: note = RNA
  misc_feature 20..21: note = DNA
tataacagatgagttaaggtt

SEQ ID NO: 2295 - DNA, 21 bp, synthetic construct
  source 1..21: mol_type = other DNA
  misc_feature 1..19: note = RNA
  misc_feature 20..21: note = DNA
tgataacagatgagttaagtt

SEQ ID NO: 2296 - DNA, 21 bp, synthetic construct
  source 1..21: mol_type = other DNA
  misc_feature 1..19: note = RNA
  misc_feature 20..21: note = DNA
tggataacagatgagttaatt

SEQ ID NO: 2297 - DNA, 21 bp, synthetic construct
  source 1..21: mol_type = other DNA
  misc_feature 1..19: note = RNA
  misc_feature 20..21: note = DNA
taggataacagatgagttatt

SEQ ID NO: 2298 - DNA, 21 bp, synthetic construct
  source 1..21: mol_type = other DNA
  misc_feature 1..19: note = RNA
  misc_feature 20..21: note = DNA
tcaggataacagatgagtttt

SEQ ID NO: 2299 - DNA, 21 bp, synthetic construct
  source 1..21: mol_type = other DNA
  misc_feature 1..19: note = RNA
  misc_feature 20..21: note = DNA
ttacagctagcaggataactt

SEQ ID NO: 2300 - DNA, 21 bp, synthetic construct
  source 1..21: mol_type = other DNA
  misc_feature 1..19: note = RNA
  misc_feature 20..21: note = DNA
tcatttctacagctagcagtt

SEQ ID NO: 2301 - DNA, 21 bp, synthetic construct
  source 1..21: mol_type = other DNA
  misc_feature 1..19: note = RNA
  misc_feature 20..21: note = DNA
tacatttctacagctagcatt

SEQ ID NO: 2302 - DNA, 21 bp, synthetic construct
  source 1..21: mol_type = other DNA
  misc_feature 1..19: note = RNA
  misc_feature 20..21: note = DNA
taggatacatttctacagctt

SEQ ID NO: 2303 - DNA, 21 bp, synthetic construct
  source 1..21: mol_type = other DNA
  misc_feature 1..19: note = RNA
  misc_feature 20..21: note = DNA
tcaggatacatttctacagtt

SEQ ID NO: 2304 - DNA, 21 bp, synthetic construct
  source 1..21: mol_type = other DNA
  misc_feature 1..19: note = RNA
  misc_feature 20..21: note = DNA
ttcaggatacatttctacatt

SEQ ID NO: 2305 - DNA, 21 bp, synthetic construct
  source 1..21: mol_type = other DNA
  misc_feature 1..19: note = RNA
  misc_feature 20..21: note = DNA
tatcaggatacatttctactt

SEQ ID NO: 2306 - DNA, 21 bp, synthetic construct
  source 1..21: mol_type = other DNA
  misc_feature 1..19: note = RNA
  misc_feature 20..21: note = DNA
tgtttatcaggatacattttt

SEQ ID NO: 2307 - DNA, 21 bp, synthetic construct
  source 1..21: mol_type = other DNA
  misc_feature 1..19: note = RNA
  misc_feature 20..21: note = DNA
ttaatgtttatcaggatactt

SEQ ID NO: 2308 - DNA, 21 bp, synthetic construct
  source 1..21: mol_type = other DNA
  misc_feature 1..19: note = RNA
  misc_feature 20..21: note = DNA
ttaagattacagtgtttaatt

SEQ ID NO: 2309 - DNA, 21 bp, synthetic construct
  source 1..21: mol_type = other DNA
  misc_feature 1..19: note = RNA
  misc_feature 20..21: note = DNA
tcacttttaagattacagttt

SEQ ID NO: 2310 - DNA, 21 bp, synthetic construct
  source 1..21: mol_type = other DNA
  misc_feature 1..19: note = RNA
  misc_feature 20..21: note = DNA
tacacttttaagattacagtt

SEQ ID NO: 2311 - DNA, 21 bp, synthetic construct
  source 1..21: mol_type = other DNA
  misc_feature 1..19: note = RNA
  misc_feature 20..21: note = DNA
ttacacttttaagattacatt

SEQ ID NO: 2312 - DNA, 21 bp, synthetic construct
  source 1..21: mol_type = other DNA
  misc_feature 1..19: note = RNA
  misc_feature 20..21: note = DNA
tttacacttttaagattactt

SEQ ID NO: 2313 - DNA, 21 bp, synthetic construct
  source 1..21: mol_type = other DNA
  misc_feature 1..19: note = RNA
  misc_feature 20..21: note = DNA
tcacaattacacttttaagtt

SEQ ID NO: 2314 - DNA, 21 bp, synthetic construct
  source 1..21: mol_type = other DNA
  misc_feature 1..19: note = RNA
  misc_feature 20..21: note = DNA
tagtttctcactacaggtatt

SEQ ID NO: 2315 - DNA, 21 bp, synthetic construct
  source 1..21: mol_type = other DNA
  misc_feature 1..19: note = RNA
  misc_feature 20..21: note = DNA
ttcttccaagtgatcataatt

SEQ ID NO: 2316 - DNA, 21 bp, synthetic construct
  source 1..21: mol_type = other DNA
  misc_feature 1..19: note = RNA
  misc_feature 20..21: note = DNA
taatcttccaagtgatcattt

SEQ ID NO: 2317 - DNA, 21 bp, synthetic construct
  source 1..21: mol_type = other DNA
  misc_feature 1..19: note = RNA
  misc_feature 20..21: note = DNA
tacaaatcttccaagtgattt

SEQ ID NO: 2318 - DNA, 21 bp, synthetic construct
  source 1..21: mol_type = other DNA
  misc_feature 1..19: note = RNA
  misc_feature 20..21: note = DNA
taactatacaaatcttccatt

SEQ ID NO: 2319 - DNA, 21 bp, synthetic construct
  source 1..21: mol_type = other DNA
  misc_feature 1..19: note = RNA
  misc_feature 20..21: note = DNA
tttttaactgagttttatatt

SEQ ID NO: 2320 - DNA, 21 bp, synthetic construct
  source 1..21: mol_type = other DNA
  misc_feature 1..19: note = RNA
  misc_feature 20..21: note = DNA
tgacattttaactgagttttt

SEQ ID NO: 2321 - DNA, 21 bp, synthetic construct
  source 1..21: mol_type = other DNA
  misc_feature 1..19: note = RNA
  misc_feature 20..21: note = DNA
tcaggtcattgaaacagactt

SEQ ID NO: 2322 - DNA, 21 bp, synthetic construct
  source 1..21: mol_type = other DNA
  misc_feature 1..19: note = RNA
  misc_feature 20..21: note = DNA
ttggcaaaatacaggtcattt

SEQ ID NO: 2323 - DNA, 21 bp, synthetic construct
  source 1..21: mol_type = other DNA
  misc_feature 1..19: note = RNA
  misc_feature 20..21: note = DNA
tgtctggcaaaatacaggttt

SEQ ID NO: 2324 - DNA, 21 bp, synthetic construct
  source 1..21: mol_type = other DNA
  misc_feature 1..19: note = RNA
  misc_feature 20..21: note = DNA
tagtctggcaaaatacaggtt

SEQ ID NO: 2325 - DNA, 21 bp, synthetic construct
  source 1..21: mol_type = other DNA
  misc_feature 1..19: note = RNA
  misc_feature 20..21: note = DNA
tatacccatctgtgatttatt

SEQ ID NO: 2326 - DNA, 21 bp, synthetic construct
  source 1..21: mol_type = other DNA
  misc_feature 1..19: note = RNA
  misc_feature 20..21: note = DNA
tttaatacccatctgtgattt

SEQ ID NO: 2327 - DNA, 21 bp, synthetic construct
  source 1..21: mol_type = other DNA
  misc_feature 1..19: note = RNA
  misc_feature 20..21: note = DNA
ttttaatacccatctgtgatt

SEQ ID NO: 2328 - DNA, 21 bp, synthetic construct
  source 1..21: mol_type = other DNA
  misc_feature 1..19: note = RNA
  misc_feature 20..21: note = DNA
tagtttaatacccatctgttt

SEQ ID NO: 2329 - DNA, 21 bp, synthetic construct
  source 1..21: mol_type = other DNA
  misc_feature 1..19: note = RNA
  misc_feature 20..21: note = DNA
taagtttaatacccatctgtt

SEQ ID NO: 2330 - DNA, 21 bp, synthetic construct
  source 1..21: mol_type = other DNA
  misc_feature 1..19: note = RNA
  misc_feature 20..21: note = DNA
tcaagtttaatacccatcttt

SEQ ID NO: 2331 - DNA, 21 bp, synthetic construct
  source 1..21: mol_type = other DNA
  misc_feature 1..19: note = RNA
  misc_feature 20..21: note = DNA
tgacaagtttaatacccattt

SEQ ID NO: 2332 - DNA, 21 bp, synthetic construct
  source 1..21: mol_type = other DNA
  misc_feature 1..19: note = RNA
  misc_feature 20..21: note = DNA
tgaaattctgacaagtttatt

SEQ ID NO: 2333 - DNA, 21 bp, synthetic construct
  source 1..21: mol_type = other DNA
  misc_feature 1..19: note = RNA
  misc_feature 20..21: note = DNA
tattcacaggcttgaatgatt

SEQ ID NO: 2334 - DNA, 21 bp, synthetic construct
  source 1..21: mol_type = other DNA
  misc_feature 1..19: note = RNA
  misc_feature 20..21: note = DNA
ttattcacaggcttgaatgtt

SEQ ID NO: 2335 - DNA, 21 bp, synthetic construct
  source 1..21: mol_type = other DNA
  misc_feature 1..19: note = RNA
  misc_feature 20..21: note = DNA
tccatacagggtttttatttt

SEQ ID NO: 2336 - DNA, 21 bp, synthetic construct
  source 1..21: mol_type = other DNA
  misc_feature 1..19: note = RNA
  misc_feature 20..21: note = DNA
tgccatacagggtttttattt

SEQ ID NO: 2337 - DNA, 21 bp, synthetic construct
  source 1..21: mol_type = other DNA
  misc_feature 1..19: note = RNA
  misc_feature 20..21: note = DNA
ttaagtgccatacagggtttt

SEQ ID NO: 2338 - DNA, 21 bp, synthetic construct
  source 1..21: mol_type = other DNA
  misc_feature 1..19: note = RNA
  misc_feature 20..21: note = DNA
tataagtgccatacagggttt

SEQ ID NO: 2339 - DNA, 21 bp, synthetic construct
  source 1..21: mol_type = other DNA
  misc_feature 1..19: note = RNA
  misc_feature 20..21: note = DNA
tgattcttttaatagcctctt

SEQ ID NO: 2340 - DNA, 21 bp, synthetic construct
  source 1..21: mol_type = other DNA
  misc_feature 1..19: note = RNA
  misc_feature 20..21: note = DNA
ttttgaatttggattcttttt

SEQ ID NO: 2341 - DNA, 21 bp, synthetic construct
  source 1..21: mol_type = other DNA
  misc_feature 1..19: note = RNA
  misc_feature 20..21: note = DNA
ttagtttgaatttggattctt

SEQ ID NO: 2342 - RNA, 21 nt, synthetic construct
  source 1..21: mol_type = other RNA
caatgtgactgctgacaaccc

SEQ ID NO: 2343 - RNA, 21 nt, synthetic construct
  source 1..21: mol_type = other RNA
tttgtcagcagtcacattgtt

SEQ ID NO: 2344 - RNA, 21 nt, synthetic construct
  source 1..21: mol_type = other RNA
caatgtgactgctgacaatcc

SEQ ID NO: 2345 - RNA, 21 nt, synthetic construct
  source 1..21: mol_type = other RNA
caatgtgactgctgacaagcc

SEQ ID NO: 2346 - RNA, 21 nt, synthetic construct
  source 1..21: mol_type = other RNA
caatgtgactgctgacaaacc

SEQ ID NO: 2347 - RNA, 21 nt, synthetic construct
  source 1..21: mol_type = other RNA
caatgtgacagctgacaaacc

SEQ ID NO: 2348 - RNA, 20 nt, synthetic construct
  source 1..20: mol_type = other RNA
caatgtgactgctgacaacc

SEQ ID NO: 2349 - RNA, 22 nt, synthetic construct
  source 1..22: mol_type = other RNA
caatgtgactgctgacaatccc

SEQ ID NO: 2350 - RNA, 21 nt, synthetic construct
  source 1..21: mol_type = other RNA
caatgtgactgctgacaacac

SEQ ID NO: 2351 - RNA, 21 nt, synthetic construct
  source 1..21: mol_type = other RNA
tttgtcagcagtcacattgtc

SEQ ID NO: 2352 - RNA, 21 nt, synthetic construct
  source 1..21: mol_type = other RNA
caatgtgactgctgacaaatc

SEQ ID NO: 2353 - RNA, 21 nt, synthetic construct
  source 1..21: mol_type = other RNA
caatgtgactgctgacaattc

SEQ ID NO: 2354 - RNA, 21 nt, synthetic construct
  source 1..21: mol_type = other RNA
tttgtcagcagtcacattgac

SEQ ID NO: 2355 - RNA, 22 nt, synthetic construct
  source 1..22: mol_type = other RNA
caatgtgactgctgacaatccc

SEQ ID NO: 2356 - RNA, 21 nt, synthetic construct
  source 1..21: mol_type = other RNA
cgacgaaggccgtgtgcgccc

SEQ ID NO: 2357 - RNA, 21 nt, synthetic construct
  source 1..21: mol_type = other RNA
tcgcacacggccttcgtcgtt

SEQ ID NO: 2358 - RNA, 21 nt, synthetic construct
  source 1..21: mol_type = other RNA
tgacttgggcaaaggtggccc

SEQ ID NO: 2359 - RNA, 21 nt, synthetic construct
  source 1..21: mol_type = other RNA
tccacctttgcccaagtcatt

SEQ ID NO: 2360 - RNA, 21 nt, synthetic construct
  source 1..21: mol_type = other RNA
aactcatctgttatcctgccc

SEQ ID NO: 2361 - RNA, 21 nt, synthetic construct
  source 1..21: mol_type = other RNA
tcaggataacagatgagtttt

SEQ ID NO: 2362 - RNA, 21 nt, synthetic construct
  source 1..21: mol_type = other RNA
ccccttaactcatctgttccc

SEQ ID NO: 2363 - RNA, 21 nt, synthetic construct
  source 1..21: mol_type = other RNA
taacagatgagttaaggggtt

SEQ ID NO: 2364 - RNA, 21 nt, synthetic construct
  source 1..21: mol_type = other RNA
cccttaactcatctgttaccc

SEQ ID NO: 2365 - RNA, 21 nt, synthetic construct
  source 1..21: mol_type = other RNA
ttaacagatgagttaagggtt

SEQ ID NO: 2366 - RNA, 21 nt, synthetic construct
  source 1..21: mol_type = other RNA
aactcatctgttatcttgccc

SEQ ID NO: 2367 - RNA, 21 nt, synthetic construct
  source 1..21: mol_type = other RNA
gctgtggaaatgtatcttccc

SEQ ID NO: 2368 - RNA, 21 nt, synthetic construct
  source 1..21: mol_type = other RNA
taggatacatttctacagctt

SEQ ID NO: 2369 - RNA, 21 nt, synthetic construct
  source 1..21: mol_type = other RNA
tgacttgggcaaaggtgagcc

SEQ ID NO: 2370 - RNA, 21 nt, synthetic construct
  source 1..21: mol_type = other RNA
ccccttaactcatctgttgcc

SEQ ID NO: 2371 - RNA, 21 nt, synthetic construct
  source 1..21: mol_type = other RNA
cccttaactcatctgttagcc

SEQ ID NO: 2372 - RNA, 21 nt, synthetic construct
  source 1..21: mol_type = other RNA
aactcatctgttatcttagcc

SEQ ID NO: 2373 - RNA, 21 nt, synthetic construct
  source 1..21: mol_type = other RNA
gctgtggaaatgtatcttgcc

SEQ ID NO: 2374 - RNA, 21 nt, synthetic construct
  source 1..21: mol_type = other RNA
tgacttgggcaaaggtaggcc

SEQ ID NO: 2375 - RNA, 21 nt, synthetic construct
  source 1..21: mol_type = other RNA
ccccttaacacatctgttacc

SEQ ID NO: 2376 - RNA, 21 nt, synthetic construct
  source 1..21: mol_type = other RNA
cccttaactgatctgttaacc

SEQ ID NO: 2377 - RNA, 21 nt, synthetic construct
  source 1..21: mol_type = other RNA
aactcatctcttatcttgccc

SEQ ID NO: 2378 - RNA, 21 nt, synthetic construct
  source 1..21: mol_type = other RNA
gctgtggaattgtatcttgcc

SEQ ID NO: 2379 - RNA, 21 nt, synthetic construct
  source 1..21: mol_type = other RNA
tgacttggggaaaggtgagcc

SEQ ID NO: 2380 - RNA, 21 nt, synthetic construct
  source 1..21: mol_type = other RNA
aactcatctgttatcttggcc

SEQ ID NO: 2381 - RNA, 21 nt, synthetic construct
  source 1..21: mol_type = other RNA
ccccttaactcatttgttccc

SEQ ID NO: 2382 - RNA, 21 nt, synthetic construct
  source 1..21: mol_type = other RNA
tgacttgggcaaaggtagccc

SEQ ID NO: 2383 - RNA, 19 nt, synthetic construct
  source 1..19: mol_type = other RNA
caatgtgactgctgacaaa

SEQ ID NO: 2384 - RNA, 21 nt, synthetic construct
  source 1..21: mol_type = other RNA
tttgtcagcagtcacattgtc

SEQ ID NO: 2385 - RNA, 21 nt, synthetic construct
  source 1..21: mol_type = other RNA
gcaggtcctcactttaatgcc

SEQ ID NO: 2386 - RNA, 21 nt, synthetic construct
  source 1..21: mol_type = other RNA
gattaaagtgaggacctgctt

SEQ ID NO: 2387 - RNA, 21 nt, synthetic construct
  source 1..21: mol_type = other RNA
ggcaatgtgactgctgacccc

SEQ ID NO: 2388 - RNA, 21 nt, synthetic construct
  source 1..21: mol_type = other RNA
tgtcagcagtcacattgcctt

SEQ ID NO: 2389 - RNA, 21 nt, synthetic construct
  source 1..21: mol_type = other RNA
gcaggtcctcactttaattcc

SEQ ID NO: 2390 - RNA, 21 nt, synthetic construct
  source 1..21: mol_type = other RNA
ggcaatgtgactgctgatgcc

SEQ ID NO: 2391 - RNA, 21 nt, synthetic construct
  source 1..21: mol_type = other RNA
gcaggtcctcactttaatccc

SEQ ID NO: 2392 - RNA, 21 nt, synthetic construct
  source 1..21: mol_type = other RNA
ggcaatgtgactgctgatacc

SEQ ID NO: 2393 - RNA, 21 nt, synthetic construct
  source 1..21: mol_type = other RNA
gcaggtcctgactttaatccc

SEQ ID NO: 2394 - RNA, 21 nt, synthetic construct
  source 1..21: mol_type = other RNA
ggcaatgtgtctgctgatacc

SEQ ID NO: 2395 - RNA, 22 nt, synthetic construct
  source 1..22: mol_type = other RNA
gattaaagtgaggacctgcttt

SEQ ID NO: 2396 - RNA, 22 nt, synthetic construct
  source 1..22: mol_type = other RNA
tgtcagcagtcacattgccttt

SEQ ID NO: 2397-2504 - skipped (108 entries)

SEQ ID NO: 2505 - RNA, 21 nt, synthetic construct
  source 1..21: mol_type = other RNA
tcaccacaagccaaacgactt

SEQ ID NO: 2506 - RNA, 21 nt, synthetic construct
  source 1..21: mol_type = other RNA
tgattaaagtgaggacctgtt

SEQ ID NO: 2507 - RNA, 21 nt, synthetic construct
  source 1..21: mol_type = other RNA
tattaaagtgaggacctgctt

SEQ ID NO: 2508 - RNA, 21 nt, synthetic construct
  source 1..21: mol_type = other RNA
tacaccacaagccaaacgatt

SEQ ID NO: 2509 - skipped

SEQ ID NO: 2510 - RNA, 22 nt, synthetic construct
  source 1..22: mol_type = other RNA
tcaccacaagccaaacgacttt

SEQ ID NO: 2511 - RNA, 21 nt, synthetic construct
  source 1..21: mol_type = other RNA
tgccagcagtcacattgcctt

SEQ ID NO: 2512-2521 - skipped (10 entries)

SEQ ID NO: 2522 - RNA, 21 nt, synthetic construct
  source 1..21: mol_type = other RNA
gtcgtttggcttgtggtggct

SEQ ID NO: 2523 - RNA, 21 nt, synthetic construct
  source 1..21: mol_type = other RNA
caggtcctcactttaatcgct

SEQ ID NO: 2524 - RNA, 21 nt, synthetic construct
  source 1..21: mol_type = other RNA
gcaggtcctcactttaatgcc

SEQ ID NO: 2525 - RNA, 21 nt, synthetic construct
  source 1..21: mol_type = other RNA
gcaggtcctcactttaatgct

SEQ ID NO: 2526 - RNA, 21 nt, synthetic construct
  source 1..21: mol_type = other RNA
tcgtttggcttgtggtgtgct

SEQ ID NO: 2527 - skipped

SEQ ID NO: 2528 - RNA, 21 nt, synthetic construct
  source 1..21: mol_type = other RNA
gtcgtttggcttgtggtggcc

SEQ ID NO: 2529 - RNA, 21 nt, synthetic construct
  source 1..21: mol_type = other RNA
caggtcctcactttaatcgcc

SEQ ID NO: 2530 - RNA, 21 nt, synthetic construct
  source 1..21: mol_type = other RNA
tcgtttggcttgtggtgtgcc

SEQ ID NO: 2531 - RNA, 21 nt, synthetic construct
  source 1..21: mol_type = other RNA
ggcaatgtgactgctggtgcc

SEQ ID NO: 2532 - RNA, 21 nt, synthetic construct
  source 1..21: mol_type = other RNA
ggcaatgtgactgctggtacc

SEQ ID NO: 2533 - RNA, 21 nt, synthetic construct
  source 1..21: mol_type = other RNA
ggcaatgtgtctgctggtacc

SEQ ID NO: 2534 - RNA, 21 nt, synthetic construct
  source 1..21: mol_type = other RNA
ggcaatgtgactgctggcccc

SEQ ID NO: 2535-2546 - skipped (12 entries)

SEQ ID NO: 2547 - DNA, 30 bp, synthetic construct
  source 1..30: mol_type = other DNA
ctcccgcagaacaccatgcgctccacggaa

SEQ ID NO: 2548 - DNA, 100 bp, synthetic construct
  source 1..100: mol_type = other DNA
gaagcaaagaaggggcagagggagcccgtgagctgagtgggccagggactgggagaaggagtgaggaggcagggccggcatgcctctgctgctggccaga

SEQ ID NO: 2549 - DNA, 54 bp, synthetic construct
  source 1..54: mol_type = other DNA
gtgctgggcggggggcggcgggccctcccgcagaacaccatgcgctcttcggaa

SEQ ID NO: 2550 - DNA, 15 bp, synthetic construct
  source 1..15: mol_type = other DNA
gtggccactgagaag

SEQ ID NO: 2551 - DNA, 18 bp, synthetic construct
  source 1..18: mol_type = other DNA
gtctgcacctgtcactag

SEQ ID NO: 2552 - DNA, 10 bp, synthetic construct
  source 1..10: mol_type = other DNA
tgtgacctgg

SEQ ID NO: 2553 - DNA, 10 bp, synthetic construct
  source 1..10: mol_type = other DNA
tgtgatttgg

SEQ ID NO: 2554 - DNA, 35 bp, synthetic construct
  source 1..35: mol_type = other DNA
ctgaggagcgccttgacagcagccatgggagggcc

SEQ ID NO: 2555 - DNA, 100 bp, synthetic construct
  source 1..100: mol_type = other DNA
tggccgtgtagtgctacccagcgctggctgcctcctcagcattgcaattcctctcccatctgggcaccagtcagctaccctggtgggaatctgggtagcc

SEQ ID NO: 2556 - DNA, 99 bp, synthetic construct
  source 1..99: mol_type = other DNA
ggccgtgtagtgctacccagcgctggctgcctcctcagcattgcaattcctctcccatctgggcaccagtcagctaccctggtgggaatctgggtagcc

SEQ ID NO: 2557 - DNA, 52 bp, synthetic construct
  source 1..52: mol_type = other DNA
ctgaggagcgccttgacagcagccatgggagggccgccccctacctcagtga

SEQ ID NO: 2558 - DNA, 52 bp, synthetic construct
  source 1..52: mol_type = other DNA
ctgtggagcgccttgacagcagccatgggagggccgccccctacctcagtga

SEQ ID NO: 2559 - DNA, 158 bp, synthetic construct
  source 1..158: mol_type = other DNA
gtgctgggcggggggcggcgggccctcccgcagaacaccatgcgctcttcggaagcaggtcctcactttaatgcctgtgacctgggattaaagtgaggacctgcttctgaggagcgccttgacagcagccatgggagggccgccccctacctcagtga

SEQ ID NO: 2560 - DNA, 158 bp, synthetic construct
  source 1..158: mol_type = other DNA
gtgctgggcggggggcggcgggccctcccgcagaacaccatgcgctcttcggaaggcaatgtgactgctggcccctgtgacctggtgccagcagtcacattgccttctgaggagcgccttgacagcagccatgggagggccgccccctacctcagtga

SEQ ID NO: 2561 - DNA, 158 bp, synthetic construct
  source 1..158: mol_type = other DNA
gtgctgggcggggggcggcgggccctcccgcagaacaccatgcgctcttcggaagcaggtcctcactttaattcctgtgacctgggattaaagtgaggacctgcttctgaggagcgccttgacagcagccatgggagggccgccccctacctcagtga

SEQ ID NO: 2562 - DNA, 122 bp, synthetic construct
  source 1..122: mol_type = other DNA
ctcccgcagaacaccatgcgctccacggaagcaggtcctcactttaatgctgtggccactgagaagtattaaagtgaggacctgcttctgaggagcgccttgacagcagccatgggagggcc

SEQ ID NO: 2563 - DNA, 122 bp, synthetic construct
  source 1..122: mol_type = other DNA
ctcccgcagaacaccatgcgctccacggaacaggtcctcactttaatcgctgtggccactgagaagtgattaaagtgaggacctgttctgaggagcgccttgacagcagccatgggagggcc

SEQ ID NO: 2564 - DNA, 158 bp, synthetic construct
  source 1..158: mol_type = other DNA
gtgctgggcggggggcggcgggccctcccgcagaacaccatgcgctcttcggaaggcaatgtgactgctggtgcctgtgacctggtgccagcagtcacattgccttctgaggagcgccttgacagcagccatgggagggccgccccctacctcagtga

SEQ ID NO: 2565 - DNA, 122 bp, synthetic construct
  source 1..122: mol_type = other DNA
ctcccgcagaacaccatgcgctccacggaagtcgtttggcttgtggtggctgtggccactgagaagtcaccacaagccaaacgacttctgaggagcgccttgacagcagccatgggagggcc

SEQ ID NO: 2566 - DNA, 122 bp, synthetic construct
  source 1..122: mol_type = other DNA
ctcccgcagaacaccatgcgctccacggaatcgtttggcttgtggtgtgctgtggccactgagaagtacaccacaagccaaacgattctgaggagcgccttgacagcagccatgggagggcc

SEQ ID NO: 2567 - DNA, 158 bp, synthetic construct
  source 1..158: mol_type = other DNA
gtgctgggcggggggcggcgggccctcccgcagaacaccatgcgctcttcggaagcaggtcctcactttaatccctgtgatttgggattaaagtgaggacctgcttctgaggagcgccttgacagcagccatgggagggccgccccctacctcagtga

SEQ ID NO: 2568 - DNA, 158 bp, synthetic construct
  source 1..158: mol_type = other DNA
gtgctgggcggggggcggcgggccctcccgcagaacaccatgcgctcttcggaaggcaatgtgactgctggtacctgtgatttggtgccagcagtcacattgccttctgaggagcgccttgacagcagccatgggagggccgccccctacctcagtga

SEQ ID NO: 2569 - DNA, 158 bp, synthetic construct
  source 1..158: mol_type = other DNA
gtgctgggcggggggcggcgggccctcccgcagaacaccatgcgctcttcggaagcaggtcctgactttaatccctgtgacctgggattaaagtgaggacctgcttctgtggagcgccttgacagcagccatgggagggccgccccctacctcagtga

SEQ ID NO: 2570 - DNA, 158 bp, synthetic construct
  source 1..158: mol_type = other DNA
gtgctgggcggggggcggcgggccctcccgcagaacaccatgcgctcttcggaaggcaatgtgtctgctggtacctgtgacctggtgccagcagtcacattgccttctgtggagcgccttgacagcagccatgggagggccgccccctacctcagtga

SEQ ID NO: 2571 - DNA, 158 bp, synthetic construct
  source 1..158: mol_type = other DNA
gtgctgggcggggggcggcgggccctcccgcagaacaccatgcgctcttcggaagcaggtcctcactttaatccctgtgacctgggattaaagtgaggacctgcttctgtggagcgccttgacagcagccatgggagggccgccccctacctcagtga

SEQ ID NO: 2572 - DNA, 158 bp, synthetic construct
  source 1..158: mol_type = other DNA
gtgctgggcggggggcggcgggccctcccgcagaacaccatgcgctcttcggaaggcaatgtgactgctggtacctgtgacctggtgccagcagtcacattgccttctgtggagcgccttgacagcagccatgggagggccgccccctacctcagtga

SEQ ID NO: 2573 - DNA, 260 bp, synthetic construct
  source 1..260: mol_type = other DNA
gaagcaaagaaggggcagagggagcccgtgagctgagtgggccagggactgggagaaggagtgaggaggcagggccggcatgcctctgctgctggccagagcaggtcctcactttaatcccgtctgcacctgtcactaggattaaagtgaggacctgctttggccgtgtagtgctacccagcgctggctgcctcctcagcattgcaattcctctcccatctgggcaccagtcagctaccctggtgggaatctgggtagcc

SEQ ID NO: 2574 - DNA, 260 bp, synthetic construct
  source 1..260: mol_type = other DNA
gaagcaaagaaggggcagagggagcccgtgagctgagtgggccagggactgggagaaggagtgaggaggcagggccggcatgcctctgctgctggccagagcaggtcctcactttaatgccgtctgcacctgtcactagtattaaagtgaggacctgctttggccgtgtagtgctacccagcgctggctgcctcctcagcattgcaattcctctcccatctgggcaccagtcagctaccctggtgggaatctgggtagcc

SEQ ID NO: 2575 - DNA, 260 bp, synthetic construct
  source 1..260: mol_type = other DNA
gaagcaaagaaggggcagagggagcccgtgagctgagtgggccagggactgggagaaggagtgaggaggcagggccggcatgcctctgctgctggccagacaggtcctcactttaatcgccgtctgcacctgtcactagtgattaaagtgaggacctgtttggccgtgtagtgctacccagcgctggctgcctcctcagcattgcaattcctctcccatctgggcaccagtcagctaccctggtgggaatctgggtagcc

SEQ ID NO: 2576 - DNA, 260 bp, synthetic construct
  source 1..260: mol_type = other DNA
gaagcaaagaaggggcagagggagcccgtgagctgagtgggccagggactgggagaaggagtgaggaggcagggccggcatgcctctgctgctggccagaggcaatgtgactgctggtaccgtctgcacctgtcactagtgccagcagtcacattgcctttggccgtgtagtgctacccagcgctggctgcctcctcagcattgcaattcctctcccatctgggcaccagtcagctaccctggtgggaatctgggtagcc

SEQ ID NO: 2577 - DNA, 260 bp, synthetic construct
  source 1..260: mol_type = other DNA
gaagcaaagaaggggcagagggagcccgtgagctgagtgggccagggactgggagaaggagtgaggaggcagggccggcatgcctctgctgctggccagagtcgtttggcttgtggtggccgtctgcacctgtcactagtcaccacaagccaaacgactttggccgtgtagtgctacccagcgctggctgcctcctcagcattgcaattcctctcccatctgggcaccagtcagctaccctggtgggaatctgggtagcc

SEQ ID NO: 2578 - DNA, 260 bp, synthetic construct
  source 1..260: mol_type = other DNA
gaagcaaagaaggggcagagggagcccgtgagctgagtgggccagggactgggagaaggagtgaggaggcagggccggcatgcctctgctgctggccagatcgtttggcttgtggtgtgccgtctgcacctgtcactagtacaccacaagccaaacgatttggccgtgtagtgctacccagcgctggctgcctcctcagcattgcaattcctctcccatctgggcaccagtcagctaccctggtgggaatctgggtagcc

SEQ ID NO: 2579 - DNA, 260 bp, synthetic construct
  source 1..260: mol_type = other DNA
gaagcaaagaaggggcagagggagcccgtgagctgagtgggccagggactgggagaaggagtgaggaggcagggccggcatgcctctgctgctggccagaccccttaactcatttgttcccgtctgcacctgtcactagtaacagatgagttaaggggtttggccgtgtagtgctacccagcgctggctgcctcctcagcattgcaattcctctcccatctgggcaccagtcagctaccctggtgggaatctgggtagcc

SEQ ID NO: 2580 - DNA, 21 bp, synthetic construct
  source 1..21: mol_type = other DNA
gcaggtcctcactttaatgcc

SEQ ID NO: 2581 - DNA, 21 bp, synthetic construct
  source 1..21: mol_type = other DNA
ggcaatgtgactgctggcccc

SEQ ID NO: 2582 - DNA, 21 bp, synthetic construct
  source 1..21: mol_type = other DNA
gcaggtcctcactttaattcc

SEQ ID NO: 2583 - DNA, 21 bp, synthetic construct
  source 1..21: mol_type = other DNA
gcaggtcctcactttaatgct

SEQ ID NO: 2584 - DNA, 21 bp, synthetic construct
  source 1..21: mol_type = other DNA
caggtcctcactttaatcgct

SEQ ID NO: 2585 - DNA, 21 bp, synthetic construct
  source 1..21: mol_type = other DNA
ggcaatgtgactgctggtgcc

SEQ ID NO: 2586 - DNA, 21 bp, synthetic construct
  source 1..21: mol_type = other DNA
gtcgtttggcttgtggtggct

SEQ ID NO: 2587 - DNA, 21 bp, synthetic construct
  source 1..21: mol_type = other DNA
tcgtttggcttgtggtgtgct

SEQ ID NO: 2588 - DNA, 21 bp, synthetic construct
  source 1..21: mol_type = other DNA
gcaggtcctcactttaatccc

SEQ ID NO: 2589 - DNA, 21 bp, synthetic construct
  source 1..21: mol_type = other DNA
ggcaatgtgactgctggtacc

SEQ ID NO: 2590 - DNA, 21 bp, synthetic construct
  source 1..21: mol_type = other DNA
gcaggtcctgactttaatccc

SEQ ID NO: 2591 - DNA, 21 bp, synthetic construct
  source 1..21: mol_type = other DNA
ggcaatgtgtctgctggtacc

SEQ ID NO: 2592 - DNA, 21 bp, synthetic construct
  source 1..21: mol_type = other DNA
gcaggtcctcactttaatccc

SEQ ID NO: 2593 - DNA, 21 bp, synthetic construct
  source 1..21: mol_type = other DNA
ggcaatgtgactgctggtacc

SEQ ID NO: 2594 - DNA, 21 bp, synthetic construct
  source 1..21: mol_type = other DNA
gcaggtcctcactttaatccc

SEQ ID NO: 2595 - DNA, 21 bp, synthetic construct
  source 1..21: mol_type = other DNA
gcaggtcctcactttaatgcc

SEQ ID NO: 2596 - DNA, 21 bp, synthetic construct
  source 1..21: mol_type = other DNA
caggtcctcactttaatcgcc

SEQ ID NO: 2597 - DNA, 21 bp, synthetic construct
  source 1..21: mol_type = other DNA
ggcaatgtgactgctggtacc

SEQ ID NO: 2598 - DNA, 21 bp, synthetic construct
  source 1..21: mol_type = other DNA
gtcgtttggcttgtggtggcc

SEQ ID NO: 2599 - DNA, 21 bp, synthetic construct
  source 1..21: mol_type = other DNA
tcgtttggcttgtggtgtgcc

SEQ ID NO: 2600 - DNA, 21 bp, synthetic construct
  source 1..21: mol_type = other DNA
ccccttaactcatttgttccc

SEQ ID NO: 2601 - DNA, 21 bp, synthetic construct
  source 1..21: mol_type = other DNA
gattaaagtgaggacctgctt

SEQ ID NO: 2602 - DNA, 21 bp, synthetic construct
  source 1..21: mol_type = other DNA
tgccagcagtcacattgcctt

SEQ ID NO: 2603 - DNA, 21 bp, synthetic construct
  source 1..21: mol_type = other DNA
gattaaagtgaggacctgctt

SEQ ID NO: 2604 - DNA, 21 bp, synthetic construct
  source 1..21: mol_type = other DNA
tattaaagtgaggacctgctt

SEQ ID NO: 2605 - DNA, 21 bp, synthetic construct
  source 1..21: mol_type = other DNA
tgattaaagtgaggacctgtt

SEQ ID NO: 2606 - DNA, 21 bp, synthetic construct
  source 1..21: mol_type = other DNA
tgccagcagtcacattgcctt

SEQ ID NO: 2607 - DNA, 21 bp, synthetic construct
  source 1..21: mol_type = other DNA
tcaccacaagccaaacgactt

SEQ ID NO: 2608 - DNA, 21 bp, synthetic construct
  source 1..21: mol_type = other DNA
tacaccacaagccaaacgatt

SEQ ID NO: 2609 - DNA, 21 bp, synthetic construct
  source 1..21: mol_type = other DNA
gattaaagtgaggacctgctt

SEQ ID NO: 2610 - DNA, 21 bp, synthetic construct
  source 1..21: mol_type = other DNA
tgccagcagtcacattgcctt

SEQ ID NO: 2611 - DNA, 21 bp, synthetic construct
  source 1..21: mol_type = other DNA
gattaaagtgaggacctgctt

SEQ ID NO: 2612 - DNA, 21 bp, synthetic construct
  source 1..21: mol_type = other DNA
tgccagcagtcacattgcctt

SEQ ID NO: 2613 - DNA, 21 bp, synthetic construct
  source 1..21: mol_type = other DNA
gattaaagtgaggacctgctt

SEQ ID NO: 2614 - DNA, 21 bp, synthetic construct
  source 1..21: mol_type = other DNA
tgccagcagtcacattgcctt

SEQ ID NO: 2615 - DNA, 21 bp, synthetic construct
  source 1..21: mol_type = other DNA
gattaaagtgaggacctgctt

SEQ ID NO: 2616 - DNA, 21 bp, synthetic construct
  source 1..21: mol_type = other DNA
tattaaagtgaggacctgctt

SEQ ID NO: 2617 - DNA, 21 bp, synthetic construct
  source 1..21: mol_type = other DNA
tgattaaagtgaggacctgtt

SEQ ID NO: 2618 - DNA, 21 bp, synthetic construct
  source 1..21: mol_type = other DNA
tgccagcagtcacattgcctt

SEQ ID NO: 2619 - DNA, 22 bp, synthetic construct
  source 1..22: mol_type = other DNA
tcaccacaagccaaacgacttt

SEQ ID NO: 2620 - DNA, 21 bp, synthetic construct
  source 1..21: mol_type = other DNA
tacaccacaagccaaacgatt

SEQ ID NO: 2621 - DNA, 21 bp, synthetic construct
  source 1..21: mol_type = other DNA
taacagatgagttaaggggtt

SEQ ID NO: 2622-3622 - skipped (1001 entries)

SEQ ID NO: 3623 - DNA, 2232 bp, synthetic construct
  source 1..2232: mol_type = other DNA
atggctgccgatggttatcttccagattggctcgaggacaaccttagtgaaggaattcgcgagtggtgggctttgaaacctggagcccctcaacccaaggcaaatcaacaacatcaagacaacgctcgaggtcttgtgcttccgggttacaaataccttggacccggcaacggactcgacaagggggagccggtcaacgcagcagacgcggcggccctcgagcacgacaaggcctacgaccagcagctcaaggccggagacaacccgtacctcaagtacaaccacgccgacgccgagttccaggagcggctcaaagaagatacgtcttttgggggcaacctcgggcgagcagtcttccaggccaaaaagaggcttcttgaacctcttggtctggttgaggaagcggctaagacggctcctggaaagaagaggcctgtagagcagtctcctcaggaaccggactcctccgcgggtattggcaaatcgggtgcacagcccgctaaaaagagactcaatttcggtcagactggcgacacagagtcagtcccagaccctcaaccaatcggagaacctcccgcagccccctcaggtgtgggatctcttacaatggcttcaggtggtggcgcaccagtggcagacaataacgaaggtgccgatggagtgggtagttcctcgggaaattggcattgcgattcccaatggctgggggacagagtcatcaccaccagcacccgaacctgggccctgcccacctacaacaatcacctctacaagcaaatctccaacagcacatctggaggatcttcaaatgacaacgcctacttcggctacagcaccccctgggggtattttgacttcaacagattccactgccacttctcaccacgtgactggcagcgactcatcaacaacaactggggattccggcctaagcgactcaacttcaagctcttcaacattcaggtcaaagaggttacggacaacaatggagtcaagaccatcgccaataaccttaccagcacggtccaggtcttcacggactcagactatcagctcccgtacgtgctcgggtcggctcacgagggctgcctcccgccgttcccagcggacgttttcatgattcctcagtacgggtatctgacgcttaatgatggaagccaggccgtgggtcgttcgtccttttactgcctggaatatttcccgtcgcaaatgctaagaacgggtaacaacttccagttcagctacgagtttgagaacgtacctttccatagcagctacgctcacagccaaagcctggaccgactaatgaatccactcatcgaccaatacttgtactatctctcaaagactattaacggttctggacagaatcaacaaacgctaaaattcagtgtggccggacccagcaacatggctgtccagggaagaaactacatacctggacccagctaccgacaacaacgtgtctcaaccactgtgactcaaaacaacaacagcgaatttgcttggcctggagcttcttcttgggctctcaatggacgtaatagcttgatgaatcctggacctgctatggccagccacaaagaaggagaggaccgtttctttcctttgtctggatctttaatttttggcaaacaaggaactggaagagacaacgtggatgcggacaaagtcatgataaccaacgaagaagaaattaaaactactaacccggtagcaacggagtcctatggacaagtggccacaaaccaccagagtccgcttaatggtgccgtccatctttatgctcaggcgcagaccggctgggttcaaaaccaaggaatacttccgggtatggtttggcaggacagagatgtgtacctgcaaggacccatttgggccaaaattcctcacacggacggcaactttcacccttctccgctgatgggagggtttggaatgaagcacccgcctcctcagatcctcatcaaaaacacacctgtacctgccgatcctccaacggccttcaacaaggacaagctgaactctttcatcacccagtattctactggccaagtcagcgtggagatcgagtgggagctgcagaaggaaaacagcaagcggtggaacccggagatccagtacacttccaactattacaagtctaataatgttgaatttgctgttaatactgaaggtgtatatagtgaaccccgccccattggcaccagatacctgactcgtaatctgtaa

SEQ ID NO: 3624 - DNA, 2232 bp, synthetic construct
  source 1..2232: mol_type = other DNA
atggctgccgatggttatcttccagattggctcgaggacaaccttagtgaaggaattcgcgagtggtgggctttgaaacctggagcccctcaacccaaggcaaatcaacaacatcaagacaacgctcgaggtcttgtgcttccgggttacaaataccttggacccggcaacggactcgacaagggggagccggtcaacgcagcagacgcggcggccctcgagcacgacaaggcctacgaccagcagctcaaggccggagacaacccgtacctcaagtacaaccacgccgacgccgagttccaggagcggctcaaagaagatacgtcttttgggggcaacctcgggcgagcagtcttccaggccaaaaagaggcttcttgaacctcttggtctggttgaggaagcggctaagacggctcctggaaagaagaggcctgtagagcagtctcctcaggaaccggactcctccgcgggtattggcaaatcgggtgcacagcccgctaaaaagagactcaatttcggtcagactggcgacacagagtcagtcccagaccctcaaccaatcggagaacctcccgcagccccctcaggtgtgggatctcttacaatggcttcaggtggtggcgcaccagtggcagacaataacgaaggtgccgatggagtgggtagttcctcgggaaattggcattgcgattcccaatggctgggggacagagtcatcaccaccagcacccgaacctgggccctgcccacctacaacaatcacctctacaagcaaatctccaacagcacatctggaggatcttcaaatgacaacgcctacttcggctacagcaccccctgggggtattttgacttcaacagattccactgccacttctcaccacgtgactggcagcgactcatcaacaacaactggggattccggcctaagcgactcaacttcaagctcttcaacattcaggtcaaagaggttacggacaacaatggagtcaagaccatcgccaataaccttaccagcacggtccaggtcttcacggactcagactatcagctcccgtacgtgctcgggtcggctcacgagggctgcctcccgccgttcccagcggacgttttcatgattcctcagtacgggtatctgacgcttaatgatggaagccaggccgtgggtcgttcgtccttttactgcctggaatatttcccgtcgcaaatgctaagaacgggtaacaacttccagttcagctacgagtttgagaacgtacctttccatagcagctacgctcacagccaaagcctggaccgactaatgaatccactcatcgaccaatacttgtactatctctcaaagactattaacggttctggacagaatcaacaaacgctaaaattcagtgtggccggacccagcaacatggctgtccagggaagaaactacatacctggacccagctaccgacaacaacgtgtctcaaccactgtgactcaaaacaacaacagcgaatttgcttggcctggagcttcttcttgggctctcaatggacgtaatagcttgatgaatcctggacctgctatggccagccacaaagaaggagaggaccgtttctttcctttgtctggatctttaatttttggcaaacaaggaactggaagagacaacgtggatgcggacaaagtcatgataaccaacgaagaagaaattaaaactactaacccggtagcaacggagtcctatggacaagtggccacaaaccaccagagtgcacaggctcgtgattctccgaagggttggcaggcgcagaccggctgggttcaaaaccaaggaatacttccgggtatggtttggcaggacagagatgtgtacctgcaaggacccatttgggccaaaattcctcacacggacggcaactttcacccttctccgctgatgggagggtttggaatgaagcacccgcctcctcagatcctcatcaaaaacacacctgtacctgccgatcctccaacggccttcaacaaggacaagctgaactctttcatcacccagtattctactggccaagtcagcgtggagatcgagtgggagctgcagaaggaaaacagcaagcggtggaacccggagatccagtacacttccaactattacaagtctaataatgttgaatttgctgttaatactgaaggtgtatatagtgaaccccgccccattggcaccagatacctgactcgtaatctgtaa

SEQ ID NO: 3625 - DNA, 2232 bp, synthetic construct
  source 1..2232: mol_type = other DNA
atggctgccgatggttatcttccagattggctcgaggacaaccttagtgaaggaattcgcgagtggtgggctttgaaacctggagcccctcaacccaaggcaaatcaacaacatcaagacaacgctcgaggtcttgtgcttccgggttacaaataccttggacccggcaacggactcgacaagggggagccggtcaacgcagcagacgcggcggccctcgagcacgacaaggcctacgaccagcagctcaaggccggagacaacccgtacctcaagtacaaccacgccgacgccgagttccaggagcggctcaaagaagatacgtcttttgggggcaacctcgggcgagcagtcttccaggccaaaaagaggcttcttgaacctcttggtctggttgaggaagcggctaagacggctcctggaaagaagaggcctgtagagcagtctcctcaggaaccggactcctccgcgggtattggcaaatcgggtgcacagcccgctaaaaagagactcaatttcggtcagactggcgacacagagtcagtcccagaccctcaaccaatcggagaacctcccgcagccccctcaggtgtgggatctcttacaatggcttcaggtggtggcgcaccagtggcagacaataacgaaggtgccgatggagtgggtagttcctcgggaaattggcattgcgattcccaatggctgggggacagagtcatcaccaccagcacccgaacctgggccctgcccacctacaacaatcacctctacaagcaaatctccaacagcacatctggaggatcttcaaatgacaacgcctacttcggctacagcaccccctgggggtattttgacttcaacagattccactgccacttctcaccacgtgactggcagcgactcatcaacaacaactggggattccggcctaagcgactcaacttcaagctcttcaacattcaggtcaaagaggttacggacaacaatggagtcaagaccatcgccaataaccttaccagcacggtccaggtcttcacggactcagactatcagctcccgtacgtgctcgggtcggctcacgagggctgcctcccgccgttcccagcggacgttttcatgattcctcagtacgggtatctgacgcttaatgatggaagccaggccgtgggtcgttcgtccttttactgcctggaatatttcccgtcgcaaatgctaagaacgggtaacaacttccagttcagctacgagtttgagaacgtacctttccatagcagctacgctcacagccaaagcctggaccgactaatgaatccactcatcgaccaatacttgtactatctctcaaagactattaacggttctggacagaatcaacaaacgctaaaattcagtgtggccggacccagcaacatggctgtccagggaagaaactacatacctggacccagctaccgacaacaacgtgtctcaaccactgtgactcaaaacaacaacagcgaatttgcttggcctggagcttcttcttgggctctcaatggacgtaatagcttgatgaatcctggacctgctatggccagccacaaagaaggagaggaccgtttctttcctttgtctggatctttaatttttggcaaacaaggaactggaagagacaacgtggatgcggacaaagtcatgataaccaacgaagaagaaattaaaactactaacccggtagcaacggagtcctatggacaagtggccacaaaccaccagagtgcacaggctcgtgattctccgaagggttggcaggcgcagaccggctgggttcaaaaccaaggaatacttccgggtatggtttggcaggacagagatgtgtacctgcaaggacccatttgggccaaaattcctcacacggacggcaactttcacccttctccgctgatgggagggtttggaatgaagcacccgcctcctcagatcctcatcaaaaacacacctgtacctgcggatcctccaacggccttcaacaaggacaagctgaactctttcatcacccagtattctactggccaagtcagcgtggagatcgagtgggagctgcagaaggaaaacagcaagcgctggaacccggagatccagtacacttccaactattacaagtctaataatgttgaatttgctgttaatactgaaggtgtatatagtgaaccccgccccattggcaccagatacctgactcgtaatctgtaa

SEQ ID NO: 3626 - DNA, 2232 bp, synthetic construct
  source 1..2232: mol_type = other DNA
atggctgccgatggttatcttccagattggctcgaggacaaccttagtgaaggaattcgcgagtggtgggctttgaaacctggagcccctcaacccaaggcaaatcaacaacatcaagacaacgctcgaggtcttgtgcttccgggttacaaataccttggacccggcaacggactcgacaagggggagccggtcaacgcagcagacgcggcggccctcgagcacgacaaggcctacgaccagcagctcaaggccggagacaacccgtacctcaagtacaaccacgccgacgccgagttccaggagcggctcaaagaagatacgtcttttgggggcaacctcgggcgagcagtcttccaggccaaaaagaggcttcttgaacctcttggtctggttgaggaagcggctaagacggctcctggaaagaagaggcctgtagagcagtctcctcaggaaccggactcctccgcgggtattggcaaatcgggtgcacagcccgctaaaaagagactcaatttcggtcagactggcgacacagagtcagtcccagaccctcaaccaatcggagaacctcccgcagccccctcaggtgtgggatctcttacaatggcttcaggtggtggcgcaccagtggcagacaataacgaaggtgccgatggagtgggtagttcctcgggaaattggcattgcgattcccaatggctgggggacagagtcatcaccaccagcacccgaacctgggccctgcccacctacaacaatcacctctacaagcaaatctccaacagcacatctggaggatcttcaaatgacaacgcctacttcggctacagcaccccctgggggtattttgacttcaacagattccactgccacttctcaccacgtgactggcagcgactcatcaacaacaactggggattccggcctaagcgactcaacttcaagctcttcaacattcaggtcaaagaggttacggacaacaatggagtcaagaccatcgccaataaccttaccagcacggtccaggtcttcacggactcagactatcagctcccgtacgtgctcgggtcggctcacgagggctgcctcccgccgttcccagcggacgttttcatgattcctcagtacgggtatctgacgcttaatgatggaagccaggccgtgggtcgttcgtccttttactgcctggaatatttcccgtcgcaaatgctaagaacgggtaacaacttccagttcagctacgagtttgagaacgtacctttccatagcagctacgctcacagccaaagcctggaccgactaatgaatccactcatcgaccaatacttgtactatctctcaaagactattaacggttctggacagaatcaacaaacgctaaaattcagtgtggccggacccagcaacatggctgtccagggaagaaactacatacctggacccagctaccgacaacaacgtgtctcaaccactgtgactcaaaacaacaacagcgaatttgcttggcctggagcttcttcttgggctctcaatggacgtaatagcttgatgaatcctggacctgctatggccagccacaaagaaggagaggaccgtttctttcctttgtctggatctttaatttttggcaaacaaggaactggaagagacaacgtggatgcggacaaagtcatgataaccaacgaagaagaaattaaaactactaacccggtagcaacggagtcctatggacaagtggccacaaaccaccagagtgcacaggcttattctacggatgtgaggatgcaggcgcagaccggctgggttcaaaaccaaggaatacttccgggtatggtttggcaggacagagatgtgtacctgcaaggacccatttgggccaaaattcctcacacggacggcaactttcacccttctccgctgatgggagggtttggaatgaagcacccgcctcctcagatcctcatcaaaaacacacctgtacctgccgatcctccaacggccttcaacaaggacaagctgaactctttcatcacccagtattctactggccaagtcagcgtggagatcgagtgggagctgcagaaggaaaacagcaagcggtggaacccggagatccagtacacttccaactattacaagtctaataatgttgaatttgctgttaatactgaaggtgtatatagtgaaccccgccccattggcaccagatacctgactcgtaatctgtaa

SEQ ID NO: 3627 - DNA, 2232 bp, synthetic construct
  source 1..2232: mol_type = other DNA
atggctgccgatggttatcttccagattggctcgaggacaaccttagtgaaggaattcgcgagtggtgggctttgaaacctggagcccctcaacccaaggcaaatcaacaacatcaagacaacgctcgaggtcttgtgcttccgggttacaaataccttggacccggcaacggactcgacaagggggagccggtcaacgcagcagacgcggcggccctcgagcacgacaaggcctacgaccagcagctcaaggccggagacaacccgtacctcaagtacaaccacgccgacgccgagttccaggagcggctcaaagaagatacgtcttttgggggcaacctcgggcgagcagtcttccaggccaaaaagaggcttcttgaacctcttggtctggttgaggaagcggctaagacggctcctggaaagaagaggcctgtagagcagtctcctcaggaaccggactcctccgcgggtattggcaaatcgggtgcacagcccgctaaaaagagactcaatttcggtcagactggcgacacagagtcagtcccagaccctcaaccaatcggagaacctcccgcagccccctcaggtgtgggatctcttacaatggcttcaggtggtggcgcaccagtggcagacaataacgaaggtgccgatggagtgggtagttcctcgggaaattggcattgcgattcccaatggctgggggacagagtcatcaccaccagcacccgaacctgggccctgcccacctacaacaatcacctctacaagcaaatctccaacagcacatctggaggatcttcaaatgacaacgcctacttcggctacagcaccccctgggggtattttgacttcaacagattccactgccacttctcaccacgtgactggcagcgactcatcaacaacaactggggattccggcctaagcgactcaacttcaagctcttcaacattcaggtcaaagaggttacggacaacaatggagtcaagaccatcgccaataaccttaccagcacggtccaggtcttcacggactcagactatcagctcccgtacgtgctcgggtcggctcacgagggctgcctcccgccgttcccagcggacgttttcatgattcctcagtacgggtatctgacgcttaatgatggaagccaggccgtgggtcgttcgtccttttactgcctggaatatttcccgtcgcaaatgctaagaacgggtaacaacttccagttcagctacgagtttgagaacgtacctttccatagcagctacgctcacagccaaagcctggaccgactaatgaatccactcatcgaccaatacttgtactatctctcaaagactattaacggttctggacagaatcaacaaacgctaaaattcagtgtggccggacccagcaacatggctgtccagggaagaaactacatacctggacccagctaccgacaacaacgtgtctcaaccactgtgactcaaaacaacaacagcgaatttgcttggcctggagcttcttcttgggctctcaatggacgtaatagcttgatgaatcctggacctgctatggccagccacaaagaaggagaggaccgtttctttcctttgtctggatctttaatttttggcaaacaaggaactggaagagacaacgtggatgcggacaaagtcatgataaccaacgaagaagaaattaaaactactaacccggtagcaacggagtcctatggacaagtggccacaaaccaccagagtgcacagattgttatgaattcgttgaaggctcaggcgcagaccggctgggttcaaaaccaaggaatacttccgggtatggtttggcaggacagagatgtgtacctgcaaggacccatttgggccaaaattcctcacacggacggcaactttcacccttctccgctgatgggagggtttggaatgaagcacccgcctcctcagatcctcatcaaaaacacacctgtacctgccgatcctccaacggccttcaacaaggacaagctgaactctttcatcacccagtattctactggccaagtcagcgtggagatcgagtgggagctgcagaaggaaaacagcaagcggtggaacccggagatccagtacacttccaactattacaagtctaataatgttgaatttgctgttaatactgaaggtgtatatagtgaaccccgccccattggcaccagatacctgactcgtaatctgtaa

SEQ ID NO: 3628 - DNA, 2232 bp, synthetic construct
  source 1..2232: mol_type = other DNA
atggctgccgatggttatcttccagattggctcgaggacaaccttagtgaaggaattcgcgagtggtgggctttgaaacctggagcccctcaacccaaggcaaatcaacaacatcaagacaacgctcgaggtcttgtgcttccgggttacaaataccttggacccggcaacggactcgacaagggggagccggtcaacgcagcagacgcggcggccctcgagcacgacaaggcctacgaccagcagctcaaggccggagacaacccgtacctcaagtacaaccacgccgacgccgagttccaggagcggctcaaagaagatacgtcttttgggggcaacctcgggcgagcagtcttccaggccaaaaagaggcttcttgaacctcttggtctggttgaggaagcggctaagacggctcctggaaagaagaggcctgtagagcagtctcctcaggaaccggactcctccgcgggtattggcaaatcgggtgcacagcccgctaaaaagagactcaatttcggtcagactggcgacacagagtcagtcccagaccctcaaccaatcggagaacctcccgcagccccctcaggtgtgggatctcttacaatggcttcaggtggtggcgcaccagtggcagacaataacgaaggtgccgatggagtgggtagttcctcgggaaattggcattgcgattcccaatggctgggggacagagtcatcaccaccagcacccgaacctgggccctgcccacctacaacaatcacctctacaagcaaatctccaacagcacatctggaggatcttcaaatgacaacgcctacttcggctacagcaccccctgggggtattttgacttcaacagattccactgccacttctcaccacgtgactggcagcgactcatcaacaacaactggggattccggcctaagcgactcaacttcaagctcttcaacattcaggtcaaagaggttacggacaacaatggagtcaagaccatcgccaataaccttaccagcacggtccaggtcttcacggactcagactatcagctcccgtacgtgctcgggtcggctcacgagggctgcctcccgccgttcccagcggacgttttcatgattcctcagtacgggtatctgacgcttaatgatggaagccaggccgtgggtcgttcgtccttttactgcctggaatatttcccgtcgcaaatgctaagaacgggtaacaacttccagttcagctacgagtttgagaacgtacctttccatagcagctacgctcacagccaaagcctggaccgactaatgaatccactcatcgaccaatacttgtactatctctcaaagactattaacggttctggacagaatcaacaaacgctaaaattcagtgtggccggacccagcaacatggctgtccagggaagaaactacatacctggacccagctaccgacaacaacgtgtctcaaccactgtgactcaaaacaacaacagcgaatttgcttggcctggagcttcttcttgggctctcaatggacgtaatagcttgatgaatcctggacctgctatggccagccacaaagaaggagaggaccgtttctttcctttgtctggatctttaatttttggcaaacaaggaactggaagagacaacgtggatgcggacaaagtcatgataaccaacgaagaagaaattaaaactactaacccggtagcaacggagtcctatggacaagtggccacaaaccaccagagtgcacaggctcgggagagtcctcgtgggctgcaggcgcagaccggctgggttcaaaaccaaggaatacttccgggtatggtttggcaggacagagatgtgtacctgcaaggacccatttgggccaaaattcctcacacggacggcaactttcacccttctccgctgatgggagggtttggaatgaagcacccgcctcctcagatcctcatcaaaaacacacctgtacctgccgatcctccaacggccttcaacaaggacaagctgaactctttcatcacccagtattctactggccaagtcagcgtggagatcgagtgggagctgcagaaggaaaacagcaagcggtggaacccggagatccagtacacttccaactattacaagtctaataatgttgaatttgctgttaatactgaaggtgtatatagtgaaccccgccccattggcaccagatacctgactcgtaatctgtaa

SEQ ID NO: 3629 - DNA, 2232 bp, synthetic construct
  source 1..2232: mol_type = other DNA
atggctgccgatggttatcttccagattggctcgaggacaaccttagtgaaggaattcgcgagtggtgggctttgaaacctggagcccctcaacccaaggcaaatcaacaacatcaagacaacgctcgaggtcttgtgcttccgggttacaaataccttggacccggcaacggactcgacaagggggagccggtcaacgcagcagacgcggcggccctcgagcacgacaaggcctacgaccagcagctcaaggccggagacaacccgtacctcaagtacaaccacgccgacgccgagttccaggagcggctcaaagaagatacgtcttttgggggcaacctcgggcgagcagtcttccaggccaaaaagaggcttcttgaacctcttggtctggttgaggaagcggctaagacggctcctggaaagaagaggcctgtagagcagtctcctcaggaaccggactcctccgcgggtattggcaaatcgggtgcacagcccgctaaaaagagactcaatttcggtcagactggcgacacagagtcagtcccagaccctcaaccaatcggagaacctcccgcagccccctcaggtgtgggatctcttacaatggcttcaggtggtggcgcaccagtggcagacaataacgaaggtgccgatggagtgggtagttcctcgggaaattggcattgcgattcccaatggctgggggacagagtcatcaccaccagcacccgaacctgggccctgcccacctacaacaatcacctctacaagcaaatctccaacagcacatctggaggatcttcaaatgacaacgcctacttcggctacagcaccccctgggggtattttgacttcaacagattccactgccacttctcaccacgtgactggcagcgactcatcaacaacaactggggattccggcctaagcgactcaacttcaagctcttcaacattcaggtcaaagaggttacggacaacaatggagtcaagaccatcgccaataaccttaccagcacggtccaggtcttcacggactcagactatcagctcccgtacgtgctcgggtcggctcacgagggctgcctcccgccgttcccagcggacgttttcatgattcctcagtacgggtatctgacgcttaatgatggaagccaggccgtgggtcgttcgtccttttactgcctggaatatttcccgtcgcaaatgctaagaacgggtaacaacttccagttcagctacgagtttgagaacgtacctttccatagcagctacgctcacagccaaagcctggaccgactaatgaatccactcatcgaccaatacttgtactatctctcaaagactattaacggttctggacagaatcaacaaacgctaaaattcagtgtggccggacccagcaacatggctgtccagggaagaaactacatacctggacccagctaccgacaacaacgtgtctcaaccactgtgactcaaaacaacaacagcgaatttgcttggcctggagcttcttcttgggctctcaatggacgtaatagcttgatgaatcctggacctgctatggccagccacaaagaaggagaggaccgtttctttcctttgtctggatctttaatttttggcaaacaaggaactggaagagacaacgtggatgcggacaaagtcatgataaccaacgaagaagaaattaaaactactaacccggtagcaacggagtcctatggacaagtggccacaaaccaccagagtgcacaggctagttttaatgatactagggctcaggcgcagaccggctgggttcaaaaccaaggaatacttccgggtatggtttggcaggacagagatgtgtacctgcaaggacccatttgggccaaaattcctcacacggacggcaactttcacccttctccgctgatgggagggtttggaatgaagcacccgcctcctcagatcctcatcaaaaacacacctgtacctgccgatcctccaacggccttcaacaaggacaagctgaactctttcatcacccagtattctactggccaagtcagcgtggagatcgagtgggagctgcagaaggaaaacagcaagcggtggaacccggagatccagtacacttccaactattacaagtctaataatgttgaatttgctgttaatactgaaggtgtatatagtgaaccccgccccattggcaccagatacctgactcgtaatctgtaa

SEQ ID NO: 3630 - DNA, 2232 bp, synthetic construct
  source 1..2232: mol_type = other DNA
atggctgccgatggttatcttccagattggctcgaggacaaccttagtgaaggaattcgcgagtggtgggctttgaaacctggagcccctcaacccaaggcaaatcaacaacatcaagacaacgctcgaggtcttgtgcttccgggttacaaataccttggacccggcaacggactcgacaagggggagccggtcaacgcagcagacgcggcggccctcgagcacgacaaggcctacgaccagcagctcaaggccggagacaacccgtacctcaagtacaaccacgccgacgccgagttccaggagcggctcaaagaagatacgtcttttgggggcaacctcgggcgagcagtcttccaggccaaaaagaggcttcttgaacctcttggtctggttgaggaagcggctaagacggctcctggaaagaagaggcctgtagagcagtctcctcaggaaccggactcctccgcgggtattggcaaatcgggtgcacagcccgctaaaaagagactcaatttcggtcagactggcgacacagagtcagtcccagaccctcaaccaatcggagaacctcccgcagccccctcaggtgtgggatctcttacaatggcttcaggtggtggcgcaccagtggcagacaataacgaaggtgccgatggagtgggtagttcctcgggaaattggcattgcgattcccaatggctgggggacagagtcatcaccaccagcacccgaacctgggccctgcccacctacaacaatcacctctacaagcaaatctccaacagcacatctggaggatcttcaaatgacaacgcctacttcggctacagcaccccctgggggtattttgacttcaacagattccactgccacttctcaccacgtgactggcagcgactcatcaacaacaactggggattccggcctaagcgactcaacttcaagctcttcaacattcaggtcaaagaggttacggacaacaatggagtcaagaccatcgccaataaccttaccagcacggtccaggtcttcacggactcagactatcagctcccgtacgtgctcgggtcggctcacgagggctgcctcccgccgttcccagcggacgttttcatgattcctcagtacgggtatctgacgcttaatgatggaagccaggccgtgggtcgttcgtccttttactgcctggaatatttcccgtcgcaaatgctaagaacgggtaacaacttccagttcagctacgagtttgagaacgtacctttccatagcagctacgctcacagccaaagcctggaccgactaatgaatccactcatcgaccaatacttgtactatctctcaaagactattaacggttctggacagaatcaacaaacgctaaaattcagtgtggccggacccagcaacatggctgtccagggaagaaactacatacctggacccagctaccgacaacaacgtgtctcaaccactgtgactcaaaacaacaacagcgaatttgcttggcctggagcttcttcttgggctctcaatggacgtaatagcttgatgaatcctggacctgctatggccagccacaaagaaggagaggaccgtttctttcctttgtctggatctttaatttttggcaaacaaggaactggaagagacaacgtggatgcggacaaagtcatgataaccaacgaagaagaaattaaaactactaacccggtagcaacggagtcctatggacaagtggccacaaaccaccagagtggtggtacgttggccgtcgtgtcgcttgctcaggcgcagaccggctgggttcaaaaccaaggaatacttccgggtatggtttggcaggacagagatgtgtacctgcaaggacccatttgggccaaaattcctcacacggacggcaactttcacccttctccgctgatgggagggtttggaatgaagcacccgcctcctcagatcctcatcaaaaacacacctgtacctgccgatcctccaacggccttcaacaaggacaagctgaactctttcatcacccagtattctactggccaagtcagcgtggagatcgagtgggagctgcagaaggaaaacagcaagcggtggaacccggagatccagtacacttccaactattacaagtctaataatgttgaatttgctgttaatactgaaggtgtatatagtgaaccccgccccattggcaccagatacctgactcgtaatctgtaa

SEQ ID NO: 3631 - DNA, 2232 bp, synthetic construct
  source 1..2232: mol_type = other DNA
atggctgccgatggttatcttccagattggctcgaggacaaccttagtgaaggaattcgcgagtggtgggctttgaaacctggagcccctcaacccaaggcaaatcaacaacatcaagacaacgctcgaggtcttgtgcttccgggttacaaataccttggacccggcaacggactcgacaagggggagccggtcaacgcagcagacgcggcggccctcgagcacgacaaggcctacgaccagcagctcaaggccggagacaacccgtacctcaagtacaaccacgccgacgccgagttccaggagcggctcaaagaagatacgtcttttgggggcaacctcgggcgagcagtcttccaggccaaaaagaggcttcttgaacctcttggtctggttgaggaagcggctaagacggctcctggaaagaagaggcctgtagagcagtctcctcaggaaccggactcctccgcgggtattggcaaatcgggtgcacagcccgctaaaaagagactcaatttcggtcagactggcgacacagagtcagtcccagaccctcaaccaatcggagaacctcccgcagccccctcaggtgtgggatctcttacaatggcttcaggtggtggcgcaccagtggcagacaataacgaaggtgccgatggagtgggtagttcctcgggaaattggcattgcgattcccaatggctgggggacagagtcatcaccaccagcacccgaacctgggccctgcccacctacaacaatcacctctacaagcaaatctccaacagcacatctggaggatcttcaaatgacaacgcctacttcggctacagcaccccctgggggtattttgacttcaacagattccactgccacttctcaccacgtgactggcagcgactcatcaacaacaactggggattccggcctaagcgactcaacttcaagctcttcaacattcaggtcaaagaggttacggacaacaatggagtcaagaccatcgccaataaccttaccagcacggtccaggtcttcacggactcagactatcagctcccgtacgtgctcgggtcggctcacgagggctgcctcccgccgttcccagcggacgttttcatgattcctcagtacgggtatctgacgcttaatgatggaagccaggccgtgggtcgttcgtccttttactgcctggaatatttcccgtcgcaaatgctaagaacgggtaacaacttccagttcagctacgagtttgagaacgtacctttccatagcagctacgctcacagccaaagcctggaccgactaatgaatccactcatcgaccaatacttgtactatctctcaaagactattaacggttctggacagaatcaacaaacgctaaaattcagtgtggccggacccagcaacatggctgtccagggaagaaactacatacctggacccagctaccgacaacaacgtgtctcaaccactgtgactcaaaacaacaacagcgaatttgcttggcctggagcttcttcttgggctctcaatggacgtaatagcttgatgaatcctggacctgctatggccagccacaaagaaggagaggaccgtttctttcctttgtctggatctttaatttttggcaaacaaggaactggaagagacaacgtggatgcggacaaagtcatgataaccaacgaagaagaaattaaaactactaacccggtagcaacggagtcctatggacaagtggccacaaaccaccagagtgcacaggcttatgggttgccgaagggtcctcaggcgcagaccggctgggttcaaaaccaaggaatacttccgggtatggtttggcaggacagagatgtgtacctgcaaggacccatttgggccaaaattcctcacacggacggcaactttcacccttctccgctgatgggagggtttggaatgaagcacccgcctcctcagatcctcatcaaaaacacacctgtacctgccgatcctccaacggccttcaacaaggacaagctgaactctttcatcacccagtattctactggccaagtcagcgtggagatcgagtgggagctgcagaaggaaaacagcaagcggtggaacccggagatccagtacacttccaactattacaagtctaataatgttgaatttgctgttaatactgaaggtgtatatagtgaaccccgccccattggcaccagatacctgactcgtaatctgtaa

SEQ ID NO: 3632 - DNA, 2232 bp, synthetic construct
  source 1..2232: mol_type = other DNA
atggctgccgatggttatcttccagattggctcgaggacaaccttagtgaaggaattcgcgagtggtgggctttgaaacctggagcccctcaacccaaggcaaatcaacaacatcaagacaacgctcgaggtcttgtgcttccgggttacaaataccttggacccggcaacggactcgacaagggggagccggtcaacgcagcagacgcggcggccctcgagcacgacaaggcctacgaccagcagctcaaggccggagacaacccgtacctcaagtacaaccacgccgacgccgagttccaggagcggctcaaagaagatacgtcttttgggggcaacctcgggcgagcagtcttccaggccaaaaagaggcttcttgaacctcttggtctggttgaggaagcggctaagacggctcctggaaagaagaggcctgtagagcagtctcctcaggaaccggactcctccgcgggtattggcaaatcgggtgcacagcccgctaaaaagagactcaatttcggtcagactggcgacacagagtcagtcccagaccctcaaccaatcggagaacctcccgcagccccctcaggtgtgggatctcttacaatggcttcaggtggtggcgcaccagtggcagacaataacgaaggtgccgatggagtgggtagttcctcgggaaattggcattgcgattcccaatggctgggggacagagtcatcaccaccagcacccgaacctgggccctgcccacctacaacaatcacctctacaagcaaatctccaacagcacatctggaggatcttcaaatgacaacgcctacttcggctacagcaccccctgggggtattttgacttcaacagattccactgccacttctcaccacgtgactggcagcgactcatcaacaacaactggggattccggcctaagcgactcaacttcaagctcttcaacattcaggtcaaagaggttacggacaacaatggagtcaagaccatcgccaataaccttaccagcacggtccaggtcttcacggactcagactatcagctcccgtacgtgctcgggtcggctcacgagggctgcctcccgccgttcccagcggacgttttcatgattcctcagtacgggtatctgacgcttaatgatggaagccaggccgtgggtcgttcgtccttttactgcctggaatatttcccgtcgcaaatgctaagaacgggtaacaacttccagttcagctacgagtttgagaacgtacctttccatagcagctacgctcacagccaaagcctggaccgactaatgaatccactcatcgaccaatacttgtactatctctcaaagactattaacggttctggacagaatcaacaaacgctaaaattcagtgtggccggacccagcaacatggctgtccagggaagaaactacatacctggacccagctaccgacaacaacgtgtctcaaccactgtgactcaaaacaacaacagcgaatttgcttggcctggagcttcttcttgggctctcaatggacgtaatagcttgatgaatcctggacctgctatggccagccacaaagaaggagaggaccgtttctttcctttgtctggatctttaatttttggcaaacaaggaactggaagagacaacgtggatgcggacaaagtcatgataaccaacgaagaagaaattaaaactactaacccggtagcaacggagtcctatggacaagtggccacaaaccaccagagtgcacaggcttcgactgggacgcttcggcttcaggcgcagaccggctgggttcaaaaccaaggaatacttccgggtatggtttggcaggacagagatgtgtacctgcaaggacccatttgggccaaaattcctcacacggacggcaactttcacccttctccgctgatgggagggtttggaatgaagcacccgcctcctcagatcctcatcaaaaacacacctgtacctgccgatcctccaacggccttcaacaaggacaagctgaactctttcatcacccagtattctactggccaagtcagcgtggagatcgagtgggagctgcagaaggaaaacagcaagcggtggaacccggagatccagtacacttccaactattacaagtctaataatgttgaatttgctgttaatactgaaggtgtatatagtgaaccccgccccattggcaccagatacctgactcgtaatctgtaa

SEQ ID NO: 3633 - DNA, 2232 bp, synthetic construct
  source 1..2232: mol_type = other DNA
atggctgccgatggttatcttccagattggctcgaggacaaccttagtgaaggaattcgcgagtggtgggctttgaaacctggagcccctcaacccaaggcaaatcaacaacatcaagacaacgctcgaggtcttgtgcttccgggttacaaataccttggacccggcaacggactcgacaagggggagccggtcaacgcagcagacgcggcggccctcgagcacgacaaggcctacgaccagcagctcaaggccggagacaacccgtacctcaagtacaaccacgccgacgccgagttccaggagcggctcaaagaagatacgtcttttgggggcaacctcgggcgagcagtcttccaggccaaaaagaggcttcttgaacctcttggtctggttgaggaagcggctaagacggctcctggaaagaagaggcctgtagagcagtctcctcaggaaccggactcctccgcgggtattggcaaatcgggtgcacagcccgctaaaaagagactcaatttcggtcagactggcgacacagagtcagtcccagaccctcaaccaatcggagaacctcccgcagccccctcaggtgtgggatctcttacaatggcttcaggtggtggcgcaccagtggcagacaataacgaaggtgccgatggagtgggtagttcctcgggaaattggcattgcgattcccaatggctgggggacagagtcatcaccaccagcacccgaacctgggccctgcccacctacaacaatcacctctacaagcaaatctccaacagcacatctggaggatcttcaaatgacaacgcctacttcggctacagcaccccctgggggtattttgacttcaacagattccactgccacttctcaccacgtgactggcagcgactcatcaacaacaactggggattccggcctaagcgactcaacttcaagctcttcaacattcaggtcaaagaggttacggacaacaatggagtcaagaccatcgccaataaccttaccagcacggtccaggtcttcacggactcagactatcagctcccgtacgtgctcgggtcggctcacgagggctgcctcccgccgttcccagcggacgttttcatgattcctcagtacgggtatctgacgcttaatgatggaagccaggccgtgggtcgttcgtccttttactgcctggaatatttcccgtcgcaaatgctaagaacgggtaacaacttccagttcagctacgagtttgagaacgtacctttccatagcagctacgctcacagccaaagcctggaccgactaatgaatccactcatcgaccaatacttgtactatctctcaaagactattaacggttctggacagaatcaacaaacgctaaaattcagtgtggccggacccagcaacatggctgtccagggaagaaactacatacctggacccagctaccgacaacaacgtgtctcaaccactgtgactcaaaacaacaacagcgaatttgcttggcctggagcttcttcttgggctctcaatggacgtaatagcttgatgaatcctggacctgctatggccagccacaaagaaggagaggaccgtttctttcctttgtctggatctttaatttttggcaaacaaggaactggaagagacaacgtggatgcggacaaagtcatgataaccaacgaagaagaaattaaaactactaacccggtagcaacggagtcctatggacaagtggccacaaaccaccagagtgcgcaggcgtattcgacggatgagaggatgcaggcgcagaccggctgggttcaaaaccaaggaatacttccgggtatggtttggcaggacagagatgtgtacctgcaaggacccatttgggccaaaattcctcacacggacggcaactttcacccttctccgctgatgggagggtttggaatgaagcacccgcctcctcagatcctcatcaaaaacacacctgtacctgccgatcctccaacggccttcaacaaggacaagctgaactctttcatcacccagtattctactggccaagtcagcgtggagatcgagtgggagctgcagaaggaaaacagcaagcggtggaacccggagatccagtacacttccaactattacaagtctaataatgttgaatttgctgttaatactgaaggtgtatatagtgaaccccgccccattggcaccagatacctgactcgtaatctgtaa

SEQ ID NO: 3634 - DNA, 2232 bp, synthetic construct
  source 1..2232: mol_type = other DNA
atggctgccgatggttatcttccagattggctcgaggacaaccttagtgaaggaattcgcgagtggtgggctttgaaacctggagcccctcaacccaaggcaaatcaacaacatcaagacaacgctcgaggtcttgtgcttccgggttacaaataccttggacccggcaacggactcgacaagggggagccggtcaacgcagcagacgcggcggccctcgagcacgacaaggcctacgaccagcagctcaaggccggagacaacccgtacctcaagtacaaccacgccgacgccgagttccaggagcggctcaaagaagatacgtcttttgggggcaacctcgggcgagcagtcttccaggccaaaaagaggcttcttgaacctcttggtctggttgaggaagcggctaagacggctcctggaaagaagaggcctgtagagcagtctcctcaggaaccggactcctccgcgggtattggcaaatcgggtgcacagcccgctaaaaagagactcaatttcggtcagactggcgacacagagtcagtcccagaccctcaaccaatcggagaacctcccgcagccccctcaggtgtgggatctcttacaatggcttcaggtggtggcgcaccagtggcagacaataacgaaggtgccgatggagtgggtagttcctcgggaaattggcattgcgattcccaatggctgggggacagagtcatcaccaccagcacccgaacctgggccctgcccacctacaacaatcacctctacaagcaaatctccaacagcacatctggaggatcttcaaatgacaacgcctacttcggctacagcaccccctgggggtattttgacttcaacagattccactgccacttctcaccacgtgactggcagcgactcatcaacaacaactggggattccggcctaagcgactcaacttcaagctcttcaacattcaggtcaaagaggttacggacaacaatggagtcaagaccatcgccaataaccttaccagcacggtccaggtcttcacggactcagactatcagctcccgtacgtgctcgggtcggctcacgagggctgcctcccgccgttcccagcggacgttttcatgattcctcagtacgggtatctgacgcttaatgatggaagccaggccgtgggtcgttcgtccttttactgcctggaatatttcccgtcgcaaatgctaagaacgggtaacaacttccagttcagctacgagtttgagaacgtacctttccatagcagctacgctcacagccaaagcctggaccgactaatgaatccactcatcgaccaatacttgtactatctctcaaagactattaacggttctggacagaatcaacaaacgctaaaattcagtgtggccggacccagcaacatggctgtccagggaagaaactacatacctggacccagctaccgacaacaacgtgtctcaaccactgtgactcaaaacaacaacagcgaatttgcttggcctggagcttcttcttgggctctcaatggacgtaatagcttgatgaatcctggacctgctatggccagccacaaagaaggagaggaccgtttctttcctttgtctggatctttaatttttggcaaacaaggaactggaagagacaacgtggatgcggacaaagtcatgataaccaacgaagaagaaattaaaactactaacccggtagcaacggagtcctatggacaagtggccacaaaccaccagagtgcgcaggcgtattcgacggatgagaggaagcaggcgcagaccggctgggttcaaaaccaaggaatacttccgggtatggtttggcaggacagagatgtgtacctgcaaggacccatttgggccaaaattcctcacacggacggcaactttcacccttctccgctgatgggagggtttggaatgaagcacccgcctcctcagatcctcatcaaaaacacacctgtacctgccgatcctccaacggccttcaacaaggacaagctgaactctttcatcacccagtattctactggccaagtcagcgtggagatcgagtgggagctgcagaaggaaaacagcaagcggtggaacccggagatccagtacacttccaactattacaagtctaataatgttgaatttgctgttaatactgaaggtgtatatagtgaaccccgccccattggcaccagatacctgactcgtaatctgtaa

SEQ ID NO: 3635 - DNA, 2232 bp, synthetic construct
  source 1..2232: mol_type = other DNA
atggctgccgatggttatcttccagattggctcgaggacaaccttagtgaaggaattcgcgagtggtgggctttgaaacctggagcccctcaacccaaggcaaatcaacaacatcaagacaacgctcgaggtcttgtgcttccgggttacaaataccttggacccggcaacggactcgacaagggggagccggtcaacgcagcagacgcggcggccctcgagcacgacaaggcctacgaccagcagctcaaggccggagacaacccgtacctcaagtacaaccacgccgacgccgagttccaggagcggctcaaagaagatacgtcttttgggggcaacctcgggcgagcagtcttccaggccaaaaagaggcttcttgaacctcttggtctggttgaggaagcggctaagacggctcctggaaagaagaggcctgtagagcagtctcctcaggaaccggactcctccgcgggtattggcaaatcgggtgcacagcccgctaaaaagagactcaatttcggtcagactggcgacacagagtcagtcccagaccctcaaccaatcggagaacctcccgcagccccctcaggtgtgggatctcttacaatggcttcaggtggtggcgcaccagtggcagacaataacgaaggtgccgatggagtgggtagttcctcgggaaattggcattgcgattcccaatggctgggggacagagtcatcaccaccagcacccgaacctgggccctgcccacctacaacaatcacctctacaagcaaatctccaacagcacatctggaggatcttcaaatgacaacgcctacttcggctacagcaccccctgggggtattttgacttcaacagattccactgccacttctcaccacgtgactggcagcgactcatcaacaacaactggggattccggcctaagcgactcaacttcaagctcttcaacattcaggtcaaagaggttacggacaacaatggagtcaagaccatcgccaataaccttaccagcacggtccaggtcttcacggactcagactatcagctcccgtacgtgctcgggtcggctcacgagggctgcctcccgccgttcccagcggacgttttcatgattcctcagtacgggtatctgacgcttaatgatggaagccaggccgtgggtcgttcgtccttttactgcctggaatatttcccgtcgcaaatgctaagaacgggtaacaacttccagttcagctacgagtttgagaacgtacctttccatagcagctacgctcacagccaaagcctggaccgactaatgaatccactcatcgaccaatacttgtactatctctcaaagactattaacggttctggacagaatcaacaaacgctaaaattcagtgtggccggacccagcaacatggctgtccagggaagaaactacatacctggacccagctaccgacaacaacgtgtctcaaccactgtgactcaaaacaacaacagcgaatttgcttggcctggagcttcttcttgggctctcaatggacgtaatagcttgatgaatcctggacctgctatggccagccacaaagaaggagaggaccgtttctttcctttgtctggatctttaatttttggcaaacaaggaactggaagagacaacgtggatgcggacaaagtcatgataaccaacgaagaagaaattaaaactactaacccggtagcaacggagtcctatggacaagtggccacaaaccaccagagtgcacaggcttatgtttcgtctgttaagatgcaggcgcagaccggctgggttcaaaaccaaggaatacttccgggtatggtttggcaggacagagatgtgtacctgcaaggacccatttgggccaaaattcctcacacggacggcaactttcacccttctccgctgatgggagggtttggaatgaagcacccgcctcctcagatcctcatcaaaaacacacctgtacctgccgatcctccaacggccttcaacaaggacaagctgaactctttcatcacccagtattctactggccaagtcagcgtggagatcgagtgggagctgcagaaggaaaacagcaagcggtggaacccggagatccagtacacttccaactattacaagtctaataatgttgaatttgctgttaatactgaaggtgtatatagtgaaccccgccccattggcaccagatacctgactcgtaatctgtaa

SEQ ID NO: 3636 - protein, 743 aa, synthetic construct
MAADGYLPDWLEDNLSEGIREWWALKPGAPQPKANQQHQDNARGLVLPGYKYLGPGNGLDKGEPVNAADAAALEHDKAYDQQLKAGDNPYLKYNHADAEFQERLKEDTSFGGNLGRAVFQAKKRLLEPLGLVEEAAKTAPGKKRPVEQSPQEPDSSAGIGKSGAQPAKKRLNFGQTGDTESVPDPQPIGEPPAAPSGVGSLTMASGGGAPVADNNEGADGVGSSSGNWHCDSQWLGDRVITTSTRTWALPTYNNHLYKQISNSTSGGSSNDNAYFGYSTPWGYFDFNRFHCHFSPRDWQRLINNNWGFRPKRLNFKLFNIQVKEVTDNNGVKTIANNLTSTVQVFTDSDYQLPYVLGSAHEGCLPPFPADVFMIPQYGYLTLNDGSQAVGRSSFYCLEYFPSQMLRTGNNFQFSYEFENVPFHSSYAHSQSLDRLMNPLIDQYLYYLSKTINGSGQNQQTLKFSVAGPSNMAVQGRNYIPGPSYRQQRVSTTVTQNNNSEFAWPGASSWALNGRNSLMNPGPAMASHKEGEDRFFPLSGSLIFGKQGTGRDNVDADKVMITNEEEIKTTNPVATESYGQVATNHQSPLNGAVHLYAQAQTGWVQNQGILPGMVWQDRDVYLQGPIWAKIPHTDGNFHPSPLMGGFGMKHPPPQILIKNTPVPADPPTAFNKDKLNSFITQYSTGQVSVEIEWELQKENSKRWNPEIQYTSNYYKSNNVEFAVNTEGVYSEPRPIGTRYLTRNL

SEQ ID NO: 3637 - protein, 743 aa, synthetic construct
MAADGYLPDWLEDNLSEGIREWWALKPGAPQPKANQQHQDNARGLVLPGYKYLGPGNGLDKGEPVNAADAAALEHDKAYDQQLKAGDNPYLKYNHADAEFQERLKEDTSFGGNLGRAVFQAKKRLLEPLGLVEEAAKTAPGKKRPVEQSPQEPDSSAGIGKSGAQPAKKRLNFGQTGDTESVPDPQPIGEPPAAPSGVGSLTMASGGGAPVADNNEGADGVGSSSGNWHCDSQWLGDRVITTSTRTWALPTYNNHLYKQISNSTSGGSSNDNAYFGYSTPWGYFDFNRFHCHFSPRDWQRLINNNWGFRPKRLNFKLFNIQVKEVTDNNGVKTIANNLTSTVQVFTDSDYQLPYVLGSAHEGCLPPFPADVFMIPQYGYLTLNDGSQAVGRSSFYCLEYFPSQMLRTGNNFQFSYEFENVPFHSSYAHSQSLDRLMNPLIDQYLYYLSKTINGSGQNQQTLKFSVAGPSNMAVQGRNYIPGPSYRQQRVSTTVTQNNNSEFAWPGASSWALNGRNSLMNPGPAMASHKEGEDRFFPLSGSLIFGKQGTGRDNVDADKVMITNEEEIKTTNPVATESYGQVATNHQSAQARDSPKGWQAQTGWVQNQGILPGMVWQDRDVYLQGPIWAKIPHTDGNFHPSPLMGGFGMKHPPPQILIKNTPVPADPPTAFNKDKLNSFITQYSTGQVSVEIEWELQKENSKRWNPEIQYTSNYYKSNNVEFAVNTEGVYSEPRPIGTRYLTRNL

SEQ ID NO: 3638 - protein, 743 aa, synthetic construct
MAADGYLPDWLEDNLSEGIREWWALKPGAPQPKANQQHQDNARGLVLPGYKYLGPGNGLDKGEPVNAADAAALEHDKAYDQQLKAGDNPYLKYNHADAEFQERLKEDTSFGGNLGRAVFQAKKRLLEPLGLVEEAAKTAPGKKRPVEQSPQEPDSSAGIGKSGAQPAKKRLNFGQTGDTESVPDPQPIGEPPAAPSGVGSLTMASGGGAPVADNNEGADGVGSSSGNWHCDSQWLGDRVITTSTRTWALPTYNNHLYKQISNSTSGGSSNDNAYFGYSTPWGYFDFNRFHCHFSPRDWQRLINNNWGFRPKRLNFKLFNIQVKEVTDNNGVKTIANNLTSTVQVFTDSDYQLPYVLGSAHEGCLPPFPADVFMIPQYGYLTLNDGSQAVGRSSFYCLEYFPSQMLRTGNNFQFSYEFENVPFHSSYAHSQSLDRLMNPLIDQYLYYLSKTINGSGQNQQTLKFSVAGPSNMAVQGRNYIPGPSYRQQRVSTTVTQNNNSEFAWPGASSWALNGRNSLMNPGPAMASHKEGEDRFFPLSGSLIFGKQGTGRDNVDADKVMITNEEEIKTTNPVATESYGQVATNHQSAQAYSTDVRMQAQTGWVQNQGILPGMVWQDRDVYLQGPIWAKIPHTDGNFHPSPLMGGFGMKHPPPQILIKNTPVPADPPTAFNKDKLNSFITQYSTGQVSVEIEWELQKENSKRWNPEIQYTSNYYKSNNVEFAVNTEGVYSEPRPIGTRYLTRNL

SEQ ID NO: 3639 - protein, 743 aa, synthetic construct
MAADGYLPDWLEDNLSEGIREWWALKPGAPQPKANQQHQDNARGLVLPGYKYLGPGNGLDKGEPVNAADAAALEHDKAYDQQLKAGDNPYLKYNHADAEFQERLKEDTSFGGNLGRAVFQAKKRLLEPLGLVEEAAKTAPGKKRPVEQSPQEPDSSAGIGKSGAQPAKKRLNFGQTGDTESVPDPQPIGEPPAAPSGVGSLTMASGGGAPVADNNEGADGVGSSSGNWHCDSQWLGDRVITTSTRTWALPTYNNHLYKQISNSTSGGSSNDNAYFGYSTPWGYFDFNRFHCHFSPRDWQRLINNNWGFRPKRLNFKLFNIQVKEVTDNNGVKTIANNLTSTVQVFTDSDYQLPYVLGSAHEGCLPPFPADVFMIPQYGYLTLNDGSQAVGRSSFYCLEYFPSQMLRTGNNFQFSYEFENVPFHSSYAHSQSLDRLMNPLIDQYLYYLSKTINGSGQNQQTLKFSVAGPSNMAVQGRNYIPGPSYRQQRVSTTVTQNNNSEFAWPGASSWALNGRNSLMNPGPAMASHKEGEDRFFPLSGSLIFGKQGTGRDNVDADKVMITNEEEIKTTNPVATESYGQVATNHQSAQIVMNSLKAQAQTGWVQNQGILPGMVWQDRDVYLQGPIWAKIPHTDGNFHPSPLMGGFGMKHPPPQILIKNTPVPADPPTAFNKDKLNSFITQYSTGQVSVEIEWELQKENSKRWNPEIQYTSNYYKSNNVEFAVNTEGVYSEPRPIGTRYLTRNL

SEQ ID NO: 3640 - protein, 743 aa, synthetic construct
MAADGYLPDWLEDNLSEGIREWWALKPGAPQPKANQQHQDNARGLVLPGYKYLGPGNGLDKGEPVNAADAAALEHDKAYDQQLKAGDNPYLKYNHADAEFQERLKEDTSFGGNLGRAVFQAKKRLLEPLGLVEEAAKTAPGKKRPVEQSPQEPDSSAGIGKSGAQPAKKRLNFGQTGDTESVPDPQPIGEPPAAPSGVGSLTMASGGGAPVADNNEGADGVGSSSGNWHCDSQWLGDRVITTSTRTWALPTYNNHLYKQISNSTSGGSSNDNAYFGYSTPWGYFDFNRFHCHFSPRDWQRLINNNWGFRPKRLNFKLFNIQVKEVTDNNGVKTIANNLTSTVQVFTDSDYQLPYVLGSAHEGCLPPFPADVFMIPQYGYLTLNDGSQAVGRSSFYCLEYFPSQMLRTGNNFQFSYEFENVPFHSSYAHSQSLDRLMNPLIDQYLYYLSKTINGSGQNQQTLKFSVAGPSNMAVQGRNYIPGPSYRQQRVSTTVTQNNNSEFAWPGASSWALNGRNSLMNPGPAMASHKEGEDRFFPLSGSLIFGKQGTGRDNVDADKVMITNEEEIKTTNPVATESYGQVATNHQSAQARESPRGLQAQTGWVQNQGILPGMVWQDRDVYLQGPIWAKIPHTDGNFHPSPLMGGFGMKHPPPQILIKNTPVPADPPTAFNKDKLNSFITQYSTGQVSVEIEWELQKENSKRWNPEIQYTSNYYKSNNVEFAVNTEGVYSEPRPIGTRYLTRNL

SEQ ID NO: 3641 - protein, 743 aa, synthetic construct
MAADGYLPDWLEDNLSEGIREWWALKPGAPQPKANQQHQDNARGLVLPGYKYLGPGNGLDKGEPVNAADAAALEHDKAYDQQLKAGDNPYLKYNHADAEFQERLKEDTSFGGNLGRAVFQAKKRLLEPLGLVEEAAKTAPGKKRPVEQSPQEPDSSAGIGKSGAQPAKKRLNFGQTGDTESVPDPQPIGEPPAAPSGVGSLTMASGGGAPVADNNEGADGVGSSSGNWHCDSQWLGDRVITTSTRTWALPTYNNHLYKQISNSTSGGSSNDNAYFGYSTPWGYFDFNRFHCHFSPRDWQRLINNNWGFRPKRLNFKLFNIQVKEVTDNNGVKTIANNLTSTVQVFTDSDYQLPYVLGSAHEGCLPPFPADVFMIPQYGYLTLNDGSQAVGRSSFYCLEYFPSQMLRTGNNFQFSYEFENVPFHSSYAHSQSLDRLMNPLIDQYLYYLSKTINGSGQNQQTLKFSVAGPSNMAVQGRNYIPGPSYRQQRVSTTVTQNNNSEFAWPGASSWALNGRNSLMNPGPAMASHKEGEDRFFPLSGSLIFGKQGTGRDNVDADKVMITNEEEIKTTNPVATESYGQVATNHQSAQASFNDTRAQAQTGWVQNQGILPGMVWQDRDVYLQGPIWAKIPHTDGNFHPSPLMGGFGMKHPPPQILIKNTPVPADPPTAFNKDKLNSFITQYSTGQVSVEIEWELQKENSKRWNPEIQYTSNYYKSNNVEFAVNTEGVYSEPRPIGTRYLTRNL

SEQ ID NO: 3642 - protein, 743 aa, synthetic construct
MAADGYLPDWLEDNLSEGIREWWALKPGAPQPKANQQHQDNARGLVLPGYKYLGPGNGLDKGEPVNAADAAALEHDKAYDQQLKAGDNPYLKYNHADAEFQERLKEDTSFGGNLGRAVFQAKKRLLEPLGLVEEAAKTAPGKKRPVEQSPQEPDSSAGIGKSGAQPAKKRLNFGQTGDTESVPDPQPIGEPPAAPSGVGSLTMASGGGAPVADNNEGADGVGSSSGNWHCDSQWLGDRVITTSTRTWALPTYNNHLYKQISNSTSGGSSNDNAYFGYSTPWGYFDFNRFHCHFSPRDWQRLINNNWGFRPKRLNFKLFNIQVKEVTDNNGVKTIANNLTSTVQVFTDSDYQLPYVLGSAHEGCLPPFPADVFMIPQYGYLTLNDGSQAVGRSSFYCLEYFPSQMLRTGNNFQFSYEFENVPFHSSYAHSQSLDRLMNPLIDQYLYYLSKTINGSGQNQQTLKFSVAGPSNMAVQGRNYIPGPSYRQQRVSTTVTQNNNSEFAWPGASSWALNGRNSLMNPGPAMASHKEGEDRFFPLSGSLIFGKQGTGRDNVDADKVMITNEEEIKTTNPVATESYGQVATNHQSGGTLAVVSLAQAQTGWVQNQGILPGMVWQDRDVYLQGPIWAKIPHTDGNFHPSPLMGGFGMKHPPPQILIKNTPVPADPPTAFNKDKLNSFITQYSTGQVSVEIEWELQKENSKRWNPEIQYTSNYYKSNNVEFAVNTEGVYSEPRPIGTRYLTRNL

SEQ ID NO: 3643 - protein, 743 aa, synthetic construct
MAADGYLPDWLEDNLSEGIREWWALKPGAPQPKANQQHQDNARGLVLPGYKYLGPGNGLDKGEPVNAADAAALEHDKAYDQQLKAGDNPYLKYNHADAEFQERLKEDTSFGGNLGRAVFQAKKRLLEPLGLVEEAAKTAPGKKRPVEQSPQEPDSSAGIGKSGAQPAKKRLNFGQTGDTESVPDPQPIGEPPAAPSGVGSLTMASGGGAPVADNNEGADGVGSSSGNWHCDSQWLGDRVITTSTRTWALPTYNNHLYKQISNSTSGGSSNDNAYFGYSTPWGYFDFNRFHCHFSPRDWQRLINNNWGFRPKRLNFKLFNIQVKEVTDNNGVKTIANNLTSTVQVFTDSDYQLPYVLGSAHEGCLPPFPADVFMIPQYGYLTLNDGSQAVGRSSFYCLEYFPSQMLRTGNNFQFSYEFENVPFHSSYAHSQSLDRLMNPLIDQYLYYLSKTINGSGQNQQTLKFSVAGPSNMAVQGRNYIPGPSYRQQRVSTTVTQNNNSEFAWPGASSWALNGRNSLMNPGPAMASHKEGEDRFFPLSGSLIFGKQGTGRDNVDADKVMITNEEEIKTTNPVATESYGQVATNHQSAQAYGLPKGPQAQTGWVQNQGILPGMVWQDRDVYLQGPIWAKIPHTDGNFHPSPLMGGFGMKHPPPQILIKNTPVPADPPTAFNKDKLNSFITQYSTGQVSVEIEWELQKENSKRWNPEIQYTSNYYKSNNVEFAVNTEGVYSEPRPIGTRYLTRNL

SEQ ID NO: 3644 - protein, 743 aa, synthetic construct
MAADGYLPDWLEDNLSEGIREWWALKPGAPQPKANQQHQDNARGLVLPGYKYLGPGNGLDKGEPVNAADAAALEHDKAYDQQLKAGDNPYLKYNHADAEFQERLKEDTSFGGNLGRAVFQAKKRLLEPLGLVEEAAKTAPGKKRPVEQSPQEPDSSAGIGKSGAQPAKKRLNFGQTGDTESVPDPQPIGEPPAAPSGVGSLTMASGGGAPVADNNEGADGVGSSSGNWHCDSQWLGDRVITTSTRTWALPTYNNHLYKQISNSTSGGSSNDNAYFGYSTPWGYFDFNRFHCHFSPRDWQRLINNNWGFRPKRLNFKLFNIQVKEVTDNNGVKTIANNLTSTVQVFTDSDYQLPYVLGSAHEGCLPPFPADVFMIPQYGYLTLNDGSQAVGRSSFYCLEYFPSQMLRTGNNFQFSYEFENVPFHSSYAHSQSLDRLMNPLIDQYLYYLSKTINGSGQNQQTLKFSVAGPSNMAVQGRNYIPGPSYRQQRVSTTVTQNNNSEFAWPGASSWALNGRNSLMNPGPAMASHKEGEDRFFPLSGSLIFGKQGTGRDNVDADKVMITNEEEIKTTNPVATESYGQVATNHQSAQASTGTLRLQAQTGWVQNQGILPGMVWQDRDVYLQGPIWAKIPHTDGNFHPSPLMGGFGMKHPPPQILIKNTPVPADPPTAFNKDKLNSFITQYSTGQVSVEIEWELQKENSKRWNPEIQYTSNYYKSNNVEFAVNTEGVYSEPRPIGTRYLTRNL

SEQ ID NO: 3645 - protein, 743 aa, synthetic construct
MAADGYLPDWLEDNLSEGIREWWALKPGAPQPKANQQHQDNARGLVLPGYKYLGPGNGLDKGEPVNAADAAALEHDKAYDQQLKAGDNPYLKYNHADAEFQERLKEDTSFGGNLGRAVFQAKKRLLEPLGLVEEAAKTAPGKKRPVEQSPQEPDSSAGIGKSGAQPAKKRLNFGQTGDTESVPDPQPIGEPPAAPSGVGSLTMASGGGAPVADNNEGADGVGSSSGNWHCDSQWLGDRVITTSTRTWALPTYNNHLYKQISNSTSGGSSNDNAYFGYSTPWGYFDFNRFHCHFSPRDWQRLINNNWGFRPKRLNFKLFNIQVKEVTDNNGVKTIANNLTSTVQVFTDSDYQLPYVLGSAHEGCLPPFPADVFMIPQYGYLTLNDGSQAVGRSSFYCLEYFPSQMLRTGNNFQFSYEFENVPFHSSYAHSQSLDRLMNPLIDQYLYYLSKTINGSGQNQQTLKFSVAGPSNMAVQGRNYIPGPSYRQQRVSTTVTQNNNSEFAWPGASSWALNGRNSLMNPGPAMASHKEGEDRFFPLSGSLIFGKQGTGRDNVDADKVMITNEEEIKTTNPVATESYGQVATNHQSAQAYSTDERMQAQTGWVQNQGILPGMVWQDRDVYLQGPIWAKIPHTDGNFHPSPLMGGFGMKHPPPQILIKNTPVPADPPTAFNKDKLNSFITQYSTGQVSVEIEWELQKENSKRWNPEIQYTSNYYKSNNVEFAVNTEGVYSEPRPIGTRYLTRNL

SEQ ID NO: 3646 - protein, 743 aa, synthetic construct
MAADGYLPDWLEDNLSEGIREWWALKPGAPQPKANQQHQDNARGLVLPGYKYLGPGNGLDKGEPVNAADAAALEHDKAYDQQLKAGDNPYLKYNHADAEFQERLKEDTSFGGNLGRAVFQAKKRLLEPLGLVEEAAKTAPGKKRPVEQSPQEPDSSAGIGKSGAQPAKKRLNFGQTGDTESVPDPQPIGEPPAAPSGVGSLTMASGGGAPVADNNEGADGVGSSSGNWHCDSQWLGDRVITTSTRTWALPTYNNHLYKQISNSTSGGSSNDNAYFGYSTPWGYFDFNRFHCHFSPRDWQRLINNNWGFRPKRLNFKLFNIQVKEVTDNNGVKTIANNLTSTVQVFTDSDYQLPYVLGSAHEGCLPPFPADVFMIPQYGYLTLNDGSQAVGRSSFYCLEYFPSQMLRTGNNFQFSYEFENVPFHSSYAHSQSLDRLMNPLIDQYLYYLSKTINGSGQNQQTLKFSVAGPSNMAVQGRNYIPGPSYRQQRVSTTVTQNNNSEFAWPGASSWALNGRNSLMNPGPAMASHKEGEDRFFPLSGSLIFGKQGTGRDNVDADKVMITNEEEIKTTNPVATESYGQVATNHQSAQAYSTDERKQAQTGWVQNQGILPGMVWQDRDVYLQGPIWAKIPHTDGNFHPSPLMGGFGMKHPPPQILIKNTPVPADPPTAFNKDKLNSFITQYSTGQVSVEIEWELQKENSKRWNPEIQYTSNYYKSNNVEFAVNTEGVYSEPRPIGTRYLTRNL

SEQ ID NO: 3647 - protein, 743 aa, synthetic construct
MAADGYLPDWLEDNLSEGIREWWALKPGAPQPKANQQHQDNARGLVLPGYKYLGPGNGLDKGEPVNAADAAALEHDKAYDQQLKAGDNPYLKYNHADAEFQERLKEDTSFGGNLGRAVFQAKKRLLEPLGLVEEAAKTAPGKKRPVEQSPQEPDSSAGIGKSGAQPAKKRLNFGQTGDTESVPDPQPIGEPPAAPSGVGSLTMASGGGAPVADNNEGADGVGSSSGNWHCDSQWLGDRVITTSTRTWALPTYNNHLYKQISNSTSGGSSNDNAYFGYSTPWGYFDFNRFHCHFSPRDWQRLINNNWGFRPKRLNFKLFNIQVKEVTDNNGVKTIANNLTSTVQVFTDSDYQLPYVLGSAHEGCLPPFPADVFMIPQYGYLTLNDGSQAVGRSSFYCLEYFPSQMLRTGNNFQFSYEFENVPFHSSYAHSQSLDRLMNPLIDQYLYYLSKTINGSGQNQQTLKFSVAGPSNMAVQGRNYIPGPSYRQQRVSTTVTQNNNSEFAWPGASSWALNGRNSLMNPGPAMASHKEGEDRFFPLSGSLIFGKQGTGRDNVDADKVMITNEEEIKTTNPVATESYGQVATNHQSAQAYVSSVKMQAQTGWVQNQGILPGMVWQDRDVYLQGPIWAKIPHTDGNFHPSPLMGGFGMKHPPPQILIKNTPVPADPPTAFNKDKLNSFITQYSTGQVSVEIEWELQKENSKRWNPEIQYTSNYYKSNNVEFAVNTEGVYSEPRPIGTRYLTRNL

SEQ ID NO: 3648 - protein, 9 aa, synthetic construct
PLNGAVHLY

SEQ ID NO: 3649 - protein, 7 aa, synthetic construct
RDSPKGW

SEQ ID NO: 3650 - protein, 7 aa, synthetic construct
YSTDVRM

SEQ ID NO: 3651 - protein, 7 aa, synthetic construct
IVMNSLK

SEQ ID NO: 3652 - protein, 7 aa, synthetic construct
RESPRGL

SEQ ID NO: 3653 - protein, 7 aa, synthetic construct
SFNDTRA

SEQ ID NO: 3654 - protein, 9 aa, synthetic construct
GGTLAVVSL

SEQ ID NO: 3655 - protein, 7 aa, synthetic construct
YGLPKGP

SEQ ID NO: 3656 - protein, 7 aa, synthetic construct
STGTLRL

SEQ ID NO: 3657 - protein, 7 aa, synthetic construct
YSTDERM

SEQ ID NO: 3658 - protein, 7 aa, synthetic construct
YSTDERK

SEQ ID NO: 3659 - protein, 7 aa, synthetic construct
YVSSVKM

SEQ ID NO: 3660 - DNA, 27 bp, synthetic construct
  source 1..27: mol_type = other DNA
ccgcttaatggtgccgtccatctttat

SEQ ID NO: 3661 - DNA, 23 bp, synthetic construct
  source 1..23: mol_type = other DNA
cgtgattctccgaagggttggca

SEQ ID NO: 3662 - DNA, 23 bp, synthetic construct
  source 1..23: mol_type = other DNA
tattctacggatgtgaggatgca

SEQ ID NO: 3663 - DNA, 23 bp, synthetic construct
  source 1..23: mol_type = other DNA
attgttatgaattcgttgaaggc

SEQ ID NO: 3664 - DNA, 23 bp, synthetic construct
  source 1..23: mol_type = other DNA
cgggagagtcctcgtgggctgca

SEQ ID NO: 3665 - DNA, 23 bp, synthetic construct
  source 1..23: mol_type = other DNA
agttttaatgatactagggctca

SEQ ID NO: 3666 - DNA, 27 bp, synthetic construct
  source 1..27: mol_type = other DNA
ggtggtacgttggccgtcgtgtcgctt

SEQ ID NO: 3667 - DNA, 21 bp, synthetic construct
  source 1..21: mol_type = other DNA
tatgggttgccgaagggtcct

SEQ ID NO: 3668 - DNA, 21 bp, synthetic construct
  source 1..21: mol_type = other DNA
tcgactgggacgcttcggctt

SEQ ID NO: 3669 - DNA, 21 bp, synthetic construct
  source 1..21: mol_type = other DNA
tattcgacggatgagaggatg

SEQ ID NO: 3670 - DNA, 21 bp, synthetic construct
  source 1..21: mol_type = other DNA
tattcgacggatgagaggaag

SEQ ID NO: 3671 - DNA, 21 bp, synthetic construct
  source 1..21: mol_type = other DNA
tatgtttcgtctgttaagatg

SEQ ID NO: 3672 - protein, 6 aa, synthetic construct
TGGAQN

SEQ ID NO: 3673 - protein, 6 aa, synthetic construct
TGGFQN

SEQ ID NO: 3674 - protein, 6 aa, synthetic construct
TGGVLN

SEQ ID NO: 3675 - protein, 6 aa, synthetic construct
TGGVQH

SEQ ID NO: 3676 - protein, 6 aa, synthetic construct
TGGVQK

SEQ ID NO: 3677 - protein, 6 aa, synthetic construct
TGGVQT

SEQ ID NO: 3678 - protein, 4 aa, synthetic construct
PLNG

SEQ ID NO: 3679 - protein, 5 aa, synthetic construct
PLNGA

SEQ ID NO: 3680 - protein, 6 aa, synthetic construct
PLNGAV

SEQ ID NO: 3681 - protein, 7 aa, synthetic construct
PLNGAVH

SEQ ID NO: 3682 - protein, 8 aa, synthetic construct
PLNGAVHL

SEQ ID NO: 3683 - protein, 4 aa, synthetic construct
NGAV

SEQ ID NO: 3684 - protein, 4 aa, synthetic construct
GAVH

SEQ ID NO: 3685 - protein, 5 aa, synthetic construct
NGAVH

SEQ ID NO: 3686 - protein, 5 aa, synthetic construct
GAVHL

SEQ ID NO: 3687 - protein, 5 aa, synthetic construct
AVHLY

SEQ ID NO: 3688 - protein, 6 aa, synthetic construct
NGAVHL

SEQ ID NO: 3689 - protein, 7 aa, synthetic construct
NGAVHLY

SEQ ID NO: 3690 - protein, 4 aa, synthetic construct
YSTD

SEQ ID NO: 3691 - protein, 5 aa, synthetic construct
YSTDE

SEQ ID NO: 3692 - protein, 6 aa, synthetic construct
YSTDER

SEQ ID NO: 3693 - protein, 4 aa, synthetic construct
IVMN

SEQ ID NO: 3694 - protein, 5 aa, synthetic construct
IVMNS

SEQ ID NO: 3695 - protein, 6 aa, synthetic construct
IVMNSL

SEQ ID NO: 3696 - protein, 6 aa, synthetic construct
TGPVQN

SEQ ID NO: 3697 - protein, 6 aa, synthetic construct
TGSAQN

SEQ ID NO: 3698 - protein, 6 aa, synthetic construct
TGSVQH

SEQ ID NO: 3699 - protein, 6 aa, synthetic construct
TGSVQI

SEQ ID NO: 3700 - protein, 5 aa, synthetic construct
YSTDV

SEQ ID NO: 3701 - protein, 6 aa, synthetic construct
YSTDVR

SEQ ID NO: 3702 - protein, 5 aa, synthetic construct
SLNGA

SEQ ID NO: 3703 - protein, 5 aa, synthetic construct
QLNGA

SEQ ID NO: 3704 - protein, 5 aa, synthetic construct
ALNGA

SEQ ID NO: 3705 - protein, 5 aa, synthetic construct
PLNGS

SEQ ID NO: 3706 - protein, 5 aa, synthetic construct
PVNGA

SEQ ID NO: 3707 - protein, 5 aa, synthetic construct
PLNGG

SEQ ID NO: 3708 - protein, 5 aa, synthetic construct
PLNGT

SEQ ID NO: 3709 - protein, 5 aa, synthetic construct
PLDGA

SEQ ID NO: 3710 - protein, 5 aa, synthetic construct
QLNGS

SEQ ID NO: 3711 - protein, 5 aa, synthetic construct
PLNGN

SEQ ID NO: 3712 - protein, 5 aa, synthetic construct
SLDGA

SEQ ID NO: 3713 - protein, 5 aa, synthetic construct
HLNGA

SEQ ID NO: 3714 - protein, 5 aa, synthetic construct
ALNGT

SEQ ID NO: 3715 - protein, 5 aa, synthetic construct
PINGA

SEQ ID NO: 3716 - protein, 5 aa, synthetic construct
ALDGA

SEQ ID NO: 3717 - protein, 5 aa, synthetic construct
PLNCA

SEQ ID NO: 3718 - protein, 5 aa, synthetic construct
PLNGQ

SEQ ID NO: 3719 - protein, 5 aa, synthetic construct
PLDSA

SEQ ID NO: 3720 - protein, 5 aa, synthetic construct
RLDGA

SEQ ID NO: 3721 - protein, 5 aa, synthetic construct
QLNGN

SEQ ID NO: 3722 - protein, 5 aa, synthetic construct
PLNGY

SEQ ID NO: 3723 - protein, 5 aa, synthetic construct
PLDSS

SEQ ID NO: 3724 - protein, 5 aa, synthetic construct
PLNGC

SEQ ID NO: 3725 - protein, 5 aa, synthetic construct
PLYGA

SEQ ID NO: 3726 - protein, 5 aa, synthetic construct
TLNGA

SEQ ID NO: 3727 - protein, 5 aa, synthetic construct
PVDGA

SEQ ID NO: 3728 - protein, 5 aa, synthetic construct
PLKGA

SEQ ID NO: 3729 - protein, 5 aa, synthetic construct
PLNGD

SEQ ID NO: 3730 - protein, 5 aa, synthetic construct
KLDGA

SEQ ID NO: 3731 - protein, 5 aa, synthetic construct
PHNGA

SEQ ID NO: 3732 - protein, 5 aa, synthetic construct
PLNGV

SEQ ID NO: 3733 - protein, 5 aa, synthetic construct
PLNAA

SEQ ID NO: 3734 - protein, 5 aa, synthetic construct
QLNGY

SEQ ID NO: 3735 - protein, 5 aa, synthetic construct
PLDGS

SEQ ID NO: 3736 - protein, 5 aa, synthetic construct
LLNGA

SEQ ID NO: 3737 - protein, 5 aa, synthetic construct
PLNRA

SEQ ID NO: 3738 - protein, 5 aa, synthetic construct
PLIGA

SEQ ID NO: 3739 - protein, 5 aa, synthetic construct
PRNGA

SEQ ID NO: 3740 - protein, 5 aa, synthetic construct
ALNGS

SEQ ID NO: 3741 - protein, 4 aa, synthetic construct
VHLY

SEQ ID NO: 3742 - protein, 4 aa, synthetic construct
VHVY

SEQ ID NO: 3743 - protein, 4 aa, synthetic construct
VPLY

SEQ ID NO: 3744 - protein, 4 aa, synthetic construct
VNLY

SEQ ID NO: 3745 - protein, 4 aa, synthetic construct
VHRY

SEQ ID NO: 3746 - protein, 4 aa, synthetic construct
VHIY

SEQ ID NO: 3747 - protein, 4 aa, synthetic construct
VHHY

SEQ ID NO: 3748 - protein, 4 aa, synthetic construct
FHLY

SEQ ID NO: 3749 - protein, 4 aa, synthetic construct
LHLY

SEQ ID NO: 3750 - protein, 4 aa, synthetic construct
DHLY

SEQ ID NO: 3751 - protein, 4 aa, synthetic construct
VQLY

SEQ ID NO: 3752 - protein, 4 aa, synthetic construct
IHLY

SEQ ID NO: 3753 - protein, 4 aa, synthetic construct
VDLY

SEQ ID NO: 3754 - protein, 4 aa, synthetic construct
AHLY

SEQ ID NO: 3755 - protein, 4 aa, synthetic construct
VLLY

SEQ ID NO: 3756 - protein, 4 aa, synthetic construct
GHLY

SEQ ID NO: 3757 - protein, 4 aa, synthetic construct
VRLY

SEQ ID NO: 3758 - protein, 4 aa, synthetic construct
VYLY

SEQ ID NO: 3759 - protein, 4 aa, synthetic construct
AQAQ

SEQ ID NO: 3760 - protein, 4 aa, synthetic construct
SQAQ

SEQ ID NO: 3761 - protein, 4 aa, synthetic construct
AQPQ

SEQ ID NO: 3762 - protein, 4 aa, synthetic construct
AQSQ

SEQ ID NO: 3763 - protein, 4 aa, synthetic construct
AKAQ

SEQ ID NO: 3764 - protein, 4 aa, synthetic construct
AHAQ

SEQ ID NO: 3765 - protein, 4 aa, synthetic construct
AQAP

SEQ ID NO: 3766 - protein, 4 aa, synthetic construct
DQAQ

SEQ ID NO: 3767 - protein, 4 aa, synthetic construct
APAQ

SEQ ID NO: 3768 - protein, 4 aa, synthetic construct
AQAK

SEQ ID NO: 3769 - protein, 4 aa, synthetic construct
AQAH

SEQ ID NO: 3770 - protein, 4 aa, synthetic construct
AQEQ

SEQ ID NO: 3771 - protein, 4 aa, synthetic construct
ALAQ

SEQ ID NO: 3772 - protein, 4 aa, synthetic construct
ARAQ

SEQ ID NO: 3773 - protein, 4 aa, synthetic construct
TQAQ

SEQ ID NO: 3774 - protein, 4 aa, synthetic construct
ALDG

SEQ ID NO: 3775 - protein, 4 aa, synthetic construct
ALNG

SEQ ID NO: 3776 - protein, 4 aa, synthetic construct
PING

SEQ ID NO: 3777 - protein, 4 aa, synthetic construct
PLDG

SEQ ID NO: 3778 - protein, 4 aa, synthetic construct
PLDS

SEQ ID NO: 3779 - protein, 4 aa, synthetic construct
QLNG

SEQ ID NO: 3780 - protein, 4 aa, synthetic construct
SLDG

SEQ ID NO: 3781 - protein, 4 aa, synthetic construct
SLNG

SEQ ID NO: 3782 - protein, 4 aa, synthetic construct
TLNG

SEQ ID NO: 3783 - protein, 8 aa, synthetic construct
LDGAVHLY

SEQ ID NO: 3784 - protein, 8 aa, synthetic construct
LNGAVHLY

SEQ ID NO: 3785 - protein, 8 aa, synthetic construct
INGAVHLY

SEQ ID NO: 3786 - protein, 8 aa, synthetic construct
LDSAVHLY

SEQ ID NO: 3787 - protein, 8 aa, synthetic construct
LDSSVHLY

SEQ ID NO: 3788 - protein, 8 aa, synthetic construct
LNGGVHLY

SEQ ID NO: 3789 - protein, 8 aa, synthetic construct
LNGNVHLY

SEQ ID NO: 3790 - protein, 8 aa, synthetic construct
LNGSVHLY

SEQ ID NO: 3791 - protein, 8 aa, synthetic construct
LNGTVHLY

SEQ ID NO: 3792 - protein, 8 aa, synthetic construct
LNGAVHIY

SEQ ID NO: 3793 - protein, 8 aa, synthetic construct
LDGAVHVY

SEQ ID NO: 3794 - protein, 8 aa, synthetic construct
LNGAVHHY

SEQ ID NO: 3795 - protein, 9 aa, synthetic construct
ALDGAVHLY

SEQ ID NO: 3796 - protein, 9 aa, synthetic construct
PINGAVHLY

SEQ ID NO: 3797 - protein, 9 aa, synthetic construct
PLDGAVHLY

SEQ ID NO: 3798 - protein, 9 aa, synthetic construct
PLDSAVHLY

SEQ ID NO: 3799 - protein, 9 aa, synthetic construct
PLDSSVHLY

SEQ ID NO: 3800 - protein, 9 aa, synthetic construct
PLNGGVHLY

SEQ ID NO: 3801 - protein, 9 aa, synthetic construct
PLNGNVHLY

SEQ ID NO: 3802 - protein, 9 aa, synthetic construct
PLNGSVHLY

SEQ ID NO: 3803 - protein, 9 aa, synthetic construct
PLNGTVHLY

SEQ ID NO: 3804 - protein, 9 aa, synthetic construct
QLNGAVHLY

SEQ ID NO: 3805 - protein, 9 aa, synthetic construct
SLDGAVHLY

SEQ ID NO: 3806 - protein, 9 aa, synthetic construct
SLNGAVHLY

SEQ ID NO: 3807 - protein, 9 aa, synthetic construct
TLNGAVHLY

SEQ ID NO: 3808 - protein, 9 aa, synthetic construct
PLNGAVHIY

SEQ ID NO: 3809 - protein, 9 aa, synthetic construct
PLDGAVHVY

SEQ ID NO: 3810 - protein, 9 aa, synthetic construct
PLNGAVHHY

SEQ ID NO: 3811 - protein, 8 aa, synthetic construct
VHLYAQAQ

SEQ ID NO: 3812 - protein, 8 aa, synthetic construct
VHLYAQPQ

SEQ ID NO: 3813 - protein, 8 aa, synthetic construct
VHLYSQAQ

SEQ ID NO: 3814 - protein, 8 aa, synthetic construct
VHLYAKAQ

SEQ ID NO: 3815 - protein, 8 aa, synthetic construct
VHLYDQAQ

SEQ ID NO: 3816 - protein, 8 aa, synthetic construct
VHIYAQAQ

SEQ ID NO: 3817 - protein, 8 aa, synthetic construct
VHVYAQAQ

SEQ ID NO: 3818 - protein, 8 aa, synthetic construct
VHHYAQAQ

SEQ ID NO: 3819 - protein, 11 aa, synthetic construct
ALDGAVHLYAQ

SEQ ID NO: 3820 - protein, 11 aa, synthetic construct
ALNGAVHLYAQ

SEQ ID NO: 3821 - protein, 11 aa, synthetic construct
PINGAVHLYAQ

SEQ ID NO: 3822 - protein, 11 aa, synthetic construct
PLDGAVHLYAQ

SEQ ID NO: 3823 - protein, 11 aa, synthetic construct
PLDGAVHLYSQ

SEQ ID NO: 3824 - protein, 11 aa, synthetic construct
PLDSAVHLYAQ

SEQ ID NO: 3825 - protein, 11 aa, synthetic construct
PLDSSVHLYAQ

SEQ ID NO: 3826 - protein, 11 aa, synthetic construct
PLNGAVHLYAK

SEQ ID NO: 3827 - protein, 11 aa, synthetic construct
PLNGAVHLYAQ

SEQ ID NO: 3828 - protein, 11 aa, synthetic construct
PLNGAVHLYDQ

SEQ ID NO: 3829 - protein, 11 aa, synthetic construct
PLNGAVHLYSQ

SEQ ID NO: 3830 - protein, 11 aa, synthetic construct
PLNGGVHLYAQ

SEQ ID NO: 3831 - protein, 11 aa, synthetic construct
PLNGNVHLYAQ

SEQ ID NO: 3832 - protein, 11 aa, synthetic construct
PLNGSVHLYAQ

SEQ ID NO: 3833 - protein, 11 aa, synthetic construct
PLNGTVHLYAQ

SEQ ID NO: 3834 - protein, 11 aa, synthetic construct
QLNGAVHLYAQ

SEQ ID NO: 3835 - protein, 11 aa, synthetic construct
SLDGAVHLYAQ

SEQ ID NO: 3836 - protein, 11 aa, synthetic construct
SLNGAVHLYAQ

SEQ ID NO: 3837 - protein, 11 aa, synthetic construct
TLNGAVHLYAQ

SEQ ID NO: 3838 - protein, 11 aa, synthetic construct
PLNGAVHIYAQ

SEQ ID NO: 3839 - protein, 11 aa, synthetic construct
PLDGAVHVYAQ

SEQ ID NO: 3840 - protein, 11 aa, synthetic construct
PLNGAVHHYAQ

SEQ ID NO: 3841 - protein, 13 aa, synthetic construct
ALDGAVHLYAQAQ

SEQ ID NO: 3842 - protein, 13 aa, synthetic construct
ALNGAVHLYAQAQ

SEQ ID NO: 3843 - protein, 13 aa, synthetic construct
PINGAVHLYAQAQ

SEQ ID NO: 3844 - protein, 13 aa, synthetic construct
PLDGAVHLYAQAQ

SEQ ID NO: 3845 - protein, 13 aa, synthetic construct
PLDGAVHLYAQPQ

SEQ ID NO: 3846 - protein, 13 aa, synthetic construct
PLDGAVHLYSQAQ

SEQ ID NO: 3847 - protein, 13 aa, synthetic construct
PLDSAVHLYAQAQ

SEQ ID NO: 3848 - protein, 13 aa, synthetic construct
PLDSSVHLYAQAQ

SEQ ID NO: 3849 - protein, 13 aa, synthetic construct
PLNGAVHLYAKAQ

SEQ ID NO: 3850 - protein, 13 aa, synthetic construct
PLNGAVHLYAQAQ

SEQ ID NO: 3851 - protein, 13 aa, synthetic construct
PLNGAVHLYAQPQ

SEQ ID NO: 3852 - protein, 13 aa, synthetic construct
PLNGAVHLYDQAQ

SEQ ID NO: 3853 - protein, 13 aa, synthetic construct
PLNGAVHLYSQAQ

SEQ ID NO: 3854 - protein, 13 aa, synthetic construct
PLNGGVHLYAQAQ

SEQ ID NO: 3855 - protein, 13 aa, synthetic construct
PLNGNVHLYAQAQ

SEQ ID NO: 3856 - protein, 13 aa, synthetic construct
PLNGSVHLYAQAQ

SEQ ID NO: 3857 - protein, 13 aa, synthetic construct
PLNGTVHLYAQAQ

SEQ ID NO: 3858 - protein, 13 aa, synthetic construct
QLNGAVHLYAQAQ

SEQ ID NO: 3859 - protein, 13 aa, synthetic construct
SLDGAVHLYAQAQ

SEQ ID NO: 3860 - protein, 13 aa, synthetic construct
SLNGAVHLYAQAQ

SEQ ID NO: 3861 - protein, 13 aa, synthetic construct
TLNGAVHLYAQAQ

SEQ ID NO: 3862 - protein, 13 aa, synthetic construct
PLNGAVHIYAQAQ

SEQ ID NO: 3863 - protein, 13 aa, synthetic construct
PLDGAVHVYAQAQ

SEQ ID NO: 3864 - protein, 13 aa, synthetic construct
PLNGAVHHYAQAQ

SEQ ID NO: 3865 - protein, 6 aa, synthetic construct
TGWVQN

SEQ ID NO: 3866 - protein, 6 aa, synthetic construct
LAAVQN

SEQ ID NO: 3867 - protein, 6 aa, synthetic construct
LTPVQN

SEQ ID NO: 3868 - protein, 6 aa, synthetic construct
SAPVQN

SEQ ID NO: 3869 - protein, 6 aa, synthetic construct
SSPVQN

SEQ ID NO: 3870 - protein, 6 aa, synthetic construct
TGRVQN

SEQ ID NO: 3871 - protein, 6 aa, synthetic construct
TGWAQN

SEQ ID NO: 3872 - protein, 6 aa, synthetic construct
TGWVQS

SEQ ID NO: 3873 - protein, 6 aa, synthetic construct
TLAVQN

SEQ ID NO: 3874 - protein, 6 aa, synthetic construct
TTSVQN

SEQ ID NO: 3875 - protein, 6 aa, synthetic construct
TSPVQN

SEQ ID NO: 3876 - protein, 6 aa, synthetic construct
TALVQN

SEQ ID NO: 3877 - protein, 6 aa, synthetic construct
TAWVQN

SEQ ID NO: 3878 - protein, 6 aa, synthetic construct
TGGVQN

SEQ ID NO: 3879 - protein, 6 aa, synthetic construct
TGSVQN

SEQ ID NO: 3880 - protein, 6 aa, synthetic construct
TGWDQN

SEQ ID NO: 3881 - protein, 6 aa, synthetic construct
TVSVQN

SEQ ID NO: 3882 - protein, 6 aa, synthetic construct
VSPVQN

SEQ ID NO: 3883 - protein, 6 aa, synthetic construct
VSSVQN

SEQ ID NO: 3884 - protein, 6 aa, synthetic construct
AAPVQN

SEQ ID NO: 3885 - protein, 6 aa, synthetic construct
AGPVQN

SEQ ID NO: 3886 - protein, 6 aa, synthetic construct
ASPVQN

SEQ ID NO: 3887 - protein, 6 aa, synthetic construct
ATPVQN

SEQ ID NO: 3888 - protein, 6 aa, synthetic construct
CSPVQN

SEQ ID NO: 3889 - protein, 6 aa, synthetic construct
CTPVQN

SEQ ID NO: 3890 - protein, 6 aa, synthetic construct
IAAVQN

SEQ ID NO: 3891 - protein, 6 aa, synthetic construct
IAGVQN

SEQ ID NO: 3892 - protein, 6 aa, synthetic construct
IASVQN

SEQ ID NO: 3893 - protein, 6 aa, synthetic construct
IGGVQN

SEQ ID NO: 3894 - protein, 6 aa, synthetic construct
IGSVQN

SEQ ID NO: 3895 - protein, 6 aa, synthetic construct
ILGVQN

SEQ ID NO: 3896 - protein, 6 aa, synthetic construct
IQPVQN

SEQ ID NO: 3897 - protein, 6 aa, synthetic construct
IQSVQN

SEQ ID NO: 3898 - protein, 6 aa, synthetic construct
ISGVQN

SEQ ID NO: 3899 - protein, 6 aa, synthetic construct
ISPVQN

SEQ ID NO: 3900 - protein, 6 aa, synthetic construct
ISSVQN

SEQ ID NO: 3901 - protein, 6 aa, synthetic construct
ITPVQN

SEQ ID NO: 3902 - protein, 6 aa, synthetic construct
LAGVQN

SEQ ID NO: 3903 - protein, 6 aa, synthetic construct
LAHVQN

SEQ ID NO: 3904 - protein, 6 aa, synthetic construct
LANVQN

SEQ ID NO: 3905 - protein, 6 aa, synthetic construct
LAPVQN

SEQ ID NO: 3906 - protein, 6 aa, synthetic construct
LAPVQT

SEQ ID NO: 3907 - protein, 6 aa, synthetic construct
LAQVQN

SEQ ID NO: 3908 - protein, 6 aa, synthetic construct
LARVQN

SEQ ID NO: 3909 - protein, 6 aa, synthetic construct
LASVQN

SEQ ID NO: 3910 - protein, 6 aa, synthetic construct
LATVQN

SEQ ID NO: 3911 - protein, 6 aa, synthetic construct
LGPVQN

SEQ ID NO: 3912 - protein, 6 aa, synthetic construct
LGQVQN

SEQ ID NO: 3913 - protein, 6 aa, synthetic construct
LGSVQN

SEQ ID NO: 3914 - protein, 6 aa, synthetic construct
LHPVQN

SEQ ID NO: 3915 - protein, 6 aa, synthetic construct
LKSVQN

SEQ ID NO: 3916 - protein, 6 aa, synthetic construct
LMAVQN

SEQ ID NO: 3917-3919 - skipped (3 entries)

SEQ ID NO: 3920 - protein, 6 aa, synthetic construct
LMGVQN

SEQ ID NO: 3921 - protein, 6 aa, synthetic construct
LMPVQN

SEQ ID NO: 3922 - protein, 6 aa, synthetic construct
LMQVQN

SEQ ID NO: 3923 - protein, 6 aa, synthetic construct
LMSVQN

SEQ ID NO: 3924 - protein, 6 aa, synthetic construct
LNPVQN

SEQ ID NO: 3925 - protein, 6 aa, synthetic construct
LQPVQN

SEQ ID NO: 3926 - protein, 6 aa, synthetic construct
LQQVQN

SEQ ID NO: 3927 - protein, 6 aa, synthetic construct
LQRVQN

SEQ ID NO: 3928 - protein, 6 aa, synthetic construct
LSHVQN

SEQ ID NO: 3929 - protein, 6 aa, synthetic construct
LSKVQN

SEQ ID NO: 3930 - protein, 6 aa, synthetic construct
LSPVQK

SEQ ID NO: 3931 - protein, 6 aa, synthetic construct
LSPVQN

SEQ ID NO: 3932 - protein, 6 aa, synthetic construct
LSQVQN

SEQ ID NO: 3933 - protein, 6 aa, synthetic construct
LSRVQN

SEQ ID NO: 3934 - protein, 6 aa, synthetic construct
LSTVQN

SEQ ID NO: 3935 - protein, 6 aa, synthetic construct
LTAVQN

SEQ ID NO: 3936 - protein, 6 aa, synthetic construct
LTNVQN

SEQ ID NO: 3937 - protein, 6 aa, synthetic construct
LTSVQN

SEQ ID NO: 3938 - protein, 6 aa, synthetic construct
MAPVQN

SEQ ID NO: 3939 - protein, 6 aa, synthetic construct
NAQVQN

SEQ ID NO: 3940 - protein, 6 aa, synthetic construct
NASVQN

SEQ ID NO: 3941 - protein, 6 aa, synthetic construct
NMQVQN

SEQ ID NO: 3942 - protein, 6 aa, synthetic construct
NSPVQN

SEQ ID NO: 3943 - protein, 6 aa, synthetic construct
NTPVQN

SEQ ID NO: 3944 - protein, 6 aa, synthetic construct
NVQVQN

SEQ ID NO: 3945 - protein, 6 aa, synthetic construct
QAPVQN

SEQ ID NO: 3946 - protein, 6 aa, synthetic construct
RAAVQN

SEQ ID NO: 3947 - protein, 6 aa, synthetic construct
RAQVQN

SEQ ID NO: 3948 - protein, 6 aa, synthetic construct
RASVQN

SEQ ID NO: 3949 - protein, 6 aa, synthetic construct
RGGVQN

SEQ ID NO: 3950 - protein, 6 aa, synthetic construct
RGSVQN

SEQ ID NO: 3951 - protein, 6 aa, synthetic construct
RIAVQN

SEQ ID NO: 3952 - protein, 6 aa, synthetic construct
RIGVQN

SEQ ID NO: 3953 - protein, 6 aa, synthetic construct
RIPVQN

SEQ ID NO: 3954 - protein, 6 aa, synthetic construct
RLGVQN

SEQ ID NO: 3955 - protein, 6 aa, synthetic construct
RLSVQN

SEQ ID NO: 3956 - protein, 6 aa, synthetic construct
RMSVQN

SEQ ID NO: 3957 - protein, 6 aa, synthetic construct
RNSVQN

SEQ ID NO: 3958 - protein, 6 aa, synthetic construct
RQPVQN

SEQ ID NO: 3959 - protein, 6 aa, synthetic construct
RSAVQN

SEQ ID NO: 3960 - protein, 6 aa, synthetic construct
RSGVQN

SEQ ID NO: 3961 - protein, 6 aa, synthetic construct
RSPVQN

SEQ ID NO: 3962 - protein, 6 aa, synthetic construct
RSQVQN

SEQ ID NO: 3963 - protein, 6 aa, synthetic construct
RSSVQN

SEQ ID NO: 3964 - protein, 6 aa, synthetic construct
RSTVQN

SEQ ID NO: 3965 - protein, 6 aa, synthetic construct
RTAVQN

SEQ ID NO: 3966 - protein, 6 aa, synthetic construct
RTGVQN

SEQ ID NO: 3967 - protein, 6 aa, synthetic construct
RTLVQN

SEQ ID NO: 3968 - protein, 6 aa, synthetic construct
RTSVQN

SEQ ID NO: 3969 - protein, 6 aa, synthetic construct
RTTVQN

SEQ ID NO: 3970 - protein, 6 aa, synthetic construct
RVEVQN

SEQ ID NO: 3971 - protein, 6 aa, synthetic construct
SAAVQN

SEQ ID NO: 3972 - protein, 6 aa, synthetic construct
SAKVQN

SEQ ID NO: 3973 - protein, 6 aa, synthetic construct
SAMVQN

SEQ ID NO: 3974 - protein, 6 aa, synthetic construct
SAQVQN

SEQ ID NO: 3975 - protein, 6 aa, synthetic construct
SGPVQN

SEQ ID NO: 3976 - protein, 6 aa, synthetic construct
SMAVQN

SEQ ID NO: 3977 - protein, 6 aa, synthetic construct
SMGVQN

SEQ ID NO: 3978 - protein, 6 aa, synthetic construct
SMQVQN

SEQ ID NO: 3979 - protein, 6 aa, synthetic construct
SMSVQN

SEQ ID NO: 3980 - protein, 6 aa, synthetic construct
STPVQN

SEQ ID NO: 3981 - protein, 6 aa, synthetic construct
SVAVQN

SEQ ID NO: 3982 - protein, 6 aa, synthetic construct
SVGVQN

SEQ ID NO: 3983 - protein, 6 aa, synthetic construct
TAAVQN

SEQ ID NO: 3984 - protein, 6 aa, synthetic construct
TAGVQN

SEQ ID NO: 3985 - protein, 6 aa, synthetic construct
TAKVQN

SEQ ID NO: 3986 - protein, 6 aa, synthetic construct
TAMVQN

SEQ ID NO: 3987 - protein, 6 aa, synthetic construct
TANVQN

SEQ ID NO: 3988 - protein, 6 aa, synthetic construct
TAPVQN

SEQ ID NO: 3989 - protein, 6 aa, synthetic construct
TAPVQT

SEQ ID NO: 3990 - protein, 6 aa, synthetic construct
TAQVQN

SEQ ID NO: 3991 - protein, 6 aa, synthetic construct
TASVQN

SEQ ID NO: 3992 - protein, 6 aa, synthetic construct
TASVQT

SEQ ID NO: 3993 - protein, 6 aa, synthetic construct
TATVQN

SEQ ID NO: 3994 - protein, 6 aa, synthetic construct
TAVVQN

SEQ ID NO: 3995 - protein, 6 aa, synthetic construct
TAWDQN

SEQ ID NO: 3996 - protein, 6 aa, synthetic construct
TAWVQH

SEQ ID NO: 3997 - protein, 6 aa, synthetic construct
TAWVQT

SEQ ID NO: 3998 - protein, 6 aa, synthetic construct
TGAVQN

SEQ ID NO: 3999 - protein, 6 aa, synthetic construct
TGCFQN

SEQ ID NO: 4000 - DNA, 1184 bp, synthetic construct
  source 1..1184: mol_type = other DNA
cgtgaggctccggtgcccgtcagtgggcagagcgcacatcgcccacagtccccgagaagttggggggaggggtcggcaattgaaccggtgcctagagaaggtggcgcggggtaaactgggaaagtgatgtcgtgtactggctccgcctttttcccgagggtgggggagaaccgtatataagtgcagtagtcgccgtgaacgttctttttcgcaacgggtttgccgccagaacacaggtaagtgccgtgtgtggttcccgcgggcctggcctctttacgggttatggcccttgcgtgccttgaattacttccacctggctgcagtacgtgattcttgatcccgagcttcgggttggaagtgggtgggagagttcgaggccttgcgcttaaggagccccttcgcctcgtgcttgagttgaggcctggcctgggcgctggggccgccgcgtgcgaatctggtggcaccttcgcgcctgtctcgctgctttcgataagtctctagccatttaaaatttttgatgacctgctgcgacgctttttttctggcaagatagtcttgtaaatgcgggccaagatctgcacactggtatttcggtttttggggccgcgggcggcgacggggcccgtgcgtcccagcgcacatgttcggcgaggcggggcctgcgagcgcggccaccgagaatcggacgggggtagtctcaagctggccggcctgctctggtgcctggcctcgcgccgccgtgtatcgccccgccctgggcggcaaggctggcccggtcggcaccagttgcgtgagcggaaagatggccgcttcccggccctgctgcagggagctcaaaatggaggacgcggcgctcgggagagcgggcgggtgagtcacccacacaaaggaaaagggcctttccgtcctcagccgtcgcttcatgtgactccacggagtaccgggcgccgtccaggcacctcgattagttctcgagcttttggagtacgtcgtctttaggttggggggaggggttttatgcgatggagtttccccacactgagtgggtggagactgaagttaggccagcttggcacttgatgtaattctccttggaatttgccctttttgagtttggatcttggttcattctcaagcctcagacagtggttcaaagtttttttcttccatttcaggtgtcgtga

SEQ ID NO: 4001 - DNA, 227 bp, synthetic construct
  source 1..227: mol_type = other DNA
gcccgtcagtgggcagagcgcacatcgcccacagtccccgagaagttggggggaggggtcggcaattgaaccggtgcctagagaaggtggcgcggggtaaactgggaaagtgatgtcgtgtactggctccgcctttttcccgagggtgggggagaaccgtatataagtgcagtagtcgccgtgaacgttctttttcgcaacgggtttgccgccagaacacgcgtaag

SEQ ID NO: 4002 - skipped

SEQ ID NO: 4003 - DNA, 16 bp, synthetic construct
  source 1..16: mol_type = other DNA
ggtggagaagagcatg

SEQ ID NO: 4004 - DNA, 27 bp, synthetic construct
  source 1..27: mol_type = other DNA
gtcatcactgaggtggagaagagcatg

SEQ ID NO: 4005-4007 - skipped (3 entries)

SEQ ID NO: 4008 - DNA, 222 bp, synthetic construct
  source 1..222: mol_type = other DNA
gcccgtcagtgggcagagcgcacatcgcccacagtccccgagaagttggggggaggggtcggcaattgaaccggtgcctagagaaggtggcgcggggtaaactgggaaagtgatgtcgtgtactggctccgcctttttcccgagggtgggggagaaccgtatataagtgcagtagtcgccgtgaacgttctttttcgcaacgggtttgccgccagaacacag

SEQ ID NO: 4009 - DNA, 222 bp, synthetic construct
  source 1..222: mol_type = other DNA
gcccgtcagtgggcagagcgcacatcgcccacagtccccgagaagttggggggaggggtcggcaattgaaccggtgcctagagaaggtggcgcggggtaaactgggaaagtgatgtcgtgtactggctccgcctttttcccgagggtgggggagaaccgtatataagtgcagtagtcgccgtgaacgttctttttcgcaacgggtttgccgccagaacacgc

SEQ ID NO: 4010 - skipped

SEQ ID NO: 4011 - DNA, 229 bp, synthetic construct
  source 1..229: mol_type = other DNA
gtgcccgtcagtgggcagagcgcacatcgcccacagtccccgagaagttggggggaggggtcggcaattgaaccggtgcctagagaaggtggcgcggggtaaactgggaaagtgatgtcgtgtactggctccgcctttttcccgagggtgggggagaaccgtatataagtgcagtagtcgccgtgaacgttctttttcgcaacgggtttgccgccagaacacgcgtaag

SEQ ID NO: 4012 - DNA, 235 bp, synthetic construct
  source 1..235: mol_type = other DNA
gctccggtgcccgtcagtgggcagagcgcacatcgcccacagtccccgagaagttggggggaggggtcggcaattgaaccggtgcctagagaaggtggcgcggggtaaactgggaaagtgatgtcgtgtactggctccgcctttttcccgagggtgggggagaaccgtatataagtgcagtagtcgccgtgaacgttctttttcgcaacgggtttgccgccagaacacgcgtaag

SEQ ID NO: 4013 - DNA, 241 bp, synthetic construct
  source 1..241: mol_type = other DNA
cgtgaggctccggtgcccgtcagtgggcagagcgcacatcgcccacagtccccgagaagttggggggaggggtcggcaattgaaccggtgcctagagaaggtggcgcggggtaaactgggaaagtgatgtcgtgtactggctccgcctttttcccgagggtgggggagaaccgtatataagtgcagtagtcgccgtgaacgttctttttcgcaacgggtttgccgccagaacacgcgtaag

SEQ ID NO: 4014 - DNA, 236 bp, synthetic construct
  source 1..236: mol_type = other DNA
cgtgaggctccggtgcccgtcagtgggcagagcgcacatcgcccacagtccccgagaagttggggggaggggtcggcaattgaaccggtgcctagagaaggtggcgcggggtaaactgggaaagtgatgtcgtgtactggctccgcctttttcccgagggtgggggagaaccgtatataagtgcagtagtcgccgtgaacgttctttttcgcaacgggtttgccgccagaacacag

SEQ ID NO: 4015 - DNA, 246 bp, synthetic construct
  source 1..246: mol_type = other DNA
gcatgcgtgaggctccggtgcccgtcagtgggcagagcgcacatcgcccacagtccccgagaagttggggggaggggtcggcaattgaaccggtgcctagagaaggtggcgcggggtaaactgggaaagtgatgtcgtgtactggctccgcctttttcccgagggtgggggagaaccgtatataagtgcagtagtcgccgtgaacgttctttttcgcaacgggtttgccgccagaacacgcgtaag

SEQ ID NO: 4016 - DNA, 241 bp, synthetic construct
  source 1..241: mol_type = other DNA
gcatgcgtgaggctccggtgcccgtcagtgggcagagcgcacatcgcccacagtccccgagaagttggggggaggggtcggcaattgaaccggtgcctagagaaggtggcgcggggtaaactgggaaagtgatgtcgtgtactggctccgcctttttcccgagggtgggggagaaccgtatataagtgcagtagtcgccgtgaacgttctttttcgcaacgggtttgccgccagaacacag

SEQ ID NO: 4017 - DNA, 257 bp, synthetic construct
  source 1..257: mol_type = other DNA
ggtggagaagagcatgcgtgaggctccggtgcccgtcagtgggcagagcgcacatcgcccacagtccccgagaagttggggggaggggtcggcaattgaaccggtgcctagagaaggtggcgcggggtaaactgggaaagtgatgtcgtgtactggctccgcctttttcccgagggtgggggagaaccgtatataagtgcagtagtcgccgtgaacgttctttttcgcaacgggtttgccgccagaacacgcgtaag

SEQ ID NO: 4018 - DNA, 252 bp, synthetic construct
  source 1..252: mol_type = other DNA
ggtggagaagagcatgcgtgaggctccggtgcccgtcagtgggcagagcgcacatcgcccacagtccccgagaagttggggggaggggtcggcaattgaaccggtgcctagagaaggtggcgcggggtaaactgggaaagtgatgtcgtgtactggctccgcctttttcccgagggtgggggagaaccgtatataagtgcagtagtcgccgtgaacgttctttttcgcaacgggtttgccgccagaacacag

SEQ ID NO: 4019 - DNA, 268 bp, synthetic construct
  source 1..268: mol_type = other DNA
gtcatcactgaggtggagaagagcatgcgtgaggctccggtgcccgtcagtgggcagagcgcacatcgcccacagtccccgagaagttggggggaggggtcggcaattgaaccggtgcctagagaaggtggcgcggggtaaactgggaaagtgatgtcgtgtactggctccgcctttttcccgagggtgggggagaaccgtatataagtgcagtagtcgccgtgaacgttctttttcgcaacgggtttgccgccagaacacgcgtaag

SEQ ID NO: 4020 - DNA, 263 bp, synthetic construct
  source 1..263: mol_type = other DNA
gtcatcactgaggtggagaagagcatgcgtgaggctccggtgcccgtcagtgggcagagcgcacatcgcccacagtccccgagaagttggggggaggggtcggcaattgaaccggtgcctagagaaggtggcgcggggtaaactgggaaagtgatgtcgtgtactggctccgcctttttcccgagggtgggggagaaccgtatataagtgcagtagtcgccgtgaacgttctttttcgcaacgggtttgccgccagaacacag

SEQ ID NO: 4021 - DNA, 654 bp, synthetic construct
  source 1..654: mol_type = other DNA
cgacattgattattgactagttattaatagtaatcaattacggggtcattagttcatagcccatatatggagttccgcgttacataacttacggtaaatggcccgcctggctgaccgcccaacgacccccgcccattgacgtcaataatgacgtatgttcccatagtaacgccaatagggactttccattgacgtcaatgggtggagtatttacggtaaactgcccacttggcagtacatcaagtgtatcatatgccaagtacgccccctattgacgtcaatgacggtaaatggcccgcctggcattatgcccagtacatgaccttatgggactttcctacttggcagtacatctacgtattagtcatcgctattaccatgtcgaggccacgttctgcttcactctccccatctcccccccctccccacccccaattttgtatttatttattttttaattattttgtgcagcgatgggggcggggggggggggcgcgcgccaggcggggcggggcggggcgaggggcggggcggggcgaggcggagaggtgcggcggcagccaatcagagcggcgcgctccgaaagtttccttttatggcgaggcggcggcggcggcggccctataaaaagcgaagcgcgcggcgggcgggagc

SEQ ID NO: 4022 - DNA, 260 bp, synthetic construct
  source 1..260: mol_type = other DNA
ccacgttctgcttcactctccccatctcccccccctccccacccccaattttgtatttatttattttttaattattttgtgcagcgatgggggcggggggggggggcgcgcgccaggcggggcggggcggggcgaggggcggggcggggcgaggcggagaggtgcggcggcagccaatcagagcggcgcgctccgaaagtttccttttatggcgaggcggcggcggcggcggccctataaaaagcgaagcgcgcggcggg

SEQ ID NO: 4023 - DNA, 500 bp, synthetic construct
  source 1..500: mol_type = other DNA
gggtaggggaggcgcttttcccaaggcagtctggagcatgcgctttagcagccccgctgggcacttggcgctacacaagtggcctctggcctcgcacacattccacatccaccggtaggcgccaaccggctccgttctttggtggccccttcgcgccaccttctactcctcccctagtcaggaagttcccccccgccccgcagctcgcgtcgtgcaggacgtgacaaatggaagtagcacgtctcactagtctcgtgcagatggacagcaccgctgagcaatggaagcgggtaggcctttggggcagcggccaatagcagctttgctccttcgctttctgggctcagaggctgggaaggggtgggtccgggggcgggctcaggggcgggctcaggggcggggcgggcgcccgaaggtcctccggaggcccggcattctgcacgcttcaaaagcgcacgtctgccgcgctgttctcctcttcctcatctccgggcctttcg

SEQ ID NO: 4024 - DNA, 84 bp, synthetic construct
  source 1..84: mol_type = other DNA
ccctaatgggccaggcggcaggggttgagaggtaggggagatgggctctgagactataaagccagcgggggcccagcagccctc

SEQ ID NO: 4025 - DNA, 658 bp, synthetic construct
  source 1..658: mol_type = other DNA
cgcgtggggttatttctctactttcgtgtctctgagtgtgcttccagtgcccccctccccccaaaaaatgccttctgagttgaatatcaacactacaaacctagtatctgcagagggccctgcgtatgagtgcaagtgggttttaggaccaggatgaggcggggtgggggtgcctacctgacgaccgaccccgacccactggacaagcacccaacccccattccccaaattgcgcatcccctatcagagagggggaggggaaacaggatgcggcgaggcgcgtgcgcactgccagcttcagcaccgcggacagtgccttcgcccccgcctggcggcgcgcgccaccgccgcctcagcactgaaggcgcgctgacgtcactcgccggtcccccgcaaactccccttcccggccaccttggtcgcgtccgcgccgccgccggcccagccggaccgcaccacgcgaggcgcgagataggggggcacgggcgcgaccatctgcgctgcggcgccggcgactcagcgctgcctcagtctgcggtgggcagcggaggagtcgtgtcgtgcctgagagcgcagctgtgctcctgggcaccgcgcagtccgcccccgcggctcctggccagaccacccctaggaccccctgccccaagtcgcagcc

SEQ ID NO: 4026 - DNA, 557 bp, synthetic construct
  source 1..557: mol_type = other DNA
tagtatctgcagagggccctgcgtatgagtgcaagtgggttttaggaccaggatgaggcggggtgggggtgcctacctgacgaccgaccccgacccactggacaagcacccaacccccattccccaaattgcgcatcccctatcagagagggggaggggaaacaggatgcggcgaggcgcgtgcgcactgccagcttcagcaccgcggacagtgccttcgcccccgcctggcggcgcgcgccaccgccgcctcagcactgaaggcgcgctgacgtcactcgccggtcccccgcaaactccccttcccggccaccttggtcgcgtccgcgccgccgccggcccagccggaccgcaccacgcgaggcgcgagataggggggcacgggcgcgaccatctgcgctgcggcgccggcgactcagcgctgcctcagtctgcggtgggcagcggaggagtcgtgtcgtgcctgagagcgcagctgtgctcctgggcaccgcgcagtccgcccccgcggctcctggccagaccacccctaggaccccctgccccaagtcgcagcc

SEQ ID NO: 4027 - DNA, 477 bp, Homo sapiens
  source 1..477: mol_type = genomic DNA
gggtggcatccctgtgacccctccccagtgcctctcctggccctggaagttgccactccagtgcccaccagccttgtcctaataaaattaagttgcatcattttgtctgactaggtgtccttctataatattatggggtggaggggggtggtatggagcaaggggcaagttgggaagacaacctgtagggcctgcggggtctattgggaaccaagctggagtgcagtggcacaatcttggctcactgcaatctccgcctcctgggttcaagcgattctcctgcctcagcctcccgagttgttgggattccaggcatgcatgaccaggctcagctaatttttgtttttttggtagagacggggtttcaccatattggccaggctggtctccaactcctaatctcaggtgatctacccaccttggcctcccaaattgctgggattacaggcgtgaaccactgctcccttccctgtcctt

SEQ ID NO: 4028 - DNA, 2169 bp, synthetic construct
  source 1..2169: mol_type = other DNA
ctgcgcgctcgctcgctcactgaggccgcccgggcaaagcccgggcgtcgggcgacctttggtcgcccggcctcagtgagcgagcgagcgcgcagagagggagtgtagccatgctctaggaagatcaattcaattcacgcgtcgacattgattattgactagttattaatagtaatcaattacggggtcattagttcatagcccatatatggagttccgcgttacataacttacggtaaatggcccgcctggctgaccgcccaacgacccccgcccattgacgtcaataatgacgtatgttcccatagtaacgccaatagggactttccattgacgtcaatgggtggagtatttacggtaaactgcccacttggcagtacatcaagtgtatcatatgccaagtacgccccctattgacgtcaatgacggtaaatggcccgcctggcattatgcccagtacatgaccttatgggactttcctacttggcagtacatctacgtattagtcatcgctattaccatgtcgaggccacgttctgcttcactctccccatctcccccccctccccacccccaattttgtatttatttattttttaattattttgtgcagcgatgggggcggggggggggggcgcgcgccaggcggggcggggcggggcgaggggcggggcggggcgaggcggagaggtgcggcggcagccaatcagagcggcgcgctccgaaagtttccttttatggcgaggcggcggcggcggcggccctataaaaagcgaagcgcgcggcgggcgggagcaagcttcgtttagtgaaccgtcagatcgcctggagacgccatccacgctgttttgacctccatagaagacaccgggaccgatccagcctccgcggattcgaatcccggccgggaacggtgcattggaacgcggattccccgtgccaagagtgacgtaagtaccgcctatagagtctataggcccacaaaaaatgctttcttcttttaatatacttttttgtttatcttatttctaatactttccctaatctctttctttcagggcaataatgatacaatgtatcatgcctctttgcaccattctaaagaataacagtgataatttctgggttaaggcaatagcaatatttctgcatataaatatttctgcatataaattgtaactgatgtaagaggtttcatattgctaatagcagctacaatccagctaccattctgcttttattttatggttgggataaggctggattattctgagtccaagctaggcccttttgctaatcatgttcatacctcttatcttcctcccacagctcctgggcaacgtgctggtctgtgtgctggcccatcactttggcaaagaattgggattcgaaccggtaccgagctctcccgcagaacaccatgcgctccacggaagcaggtcctcactttaatgctgtggccactgagaagtattaaagtgaggacctgcttctgaggagcgccttgacagcagccatgggagggcctcgaggggtggcatccctgtgacccctccccagtgcctctcctggccctggaagttgccactccagtgcccaccagccttgtcctaataaaattaagttgcatcattttgtctgactaggtgtccttctataatattatggggtggaggggggtggtatggagcaaggggcaagttgggaagacaacctgtagggcctgcggggtctattgggaaccaagctggagtgcagtggcacaatcttggctcactgcaatctccgcctcctgggttcaagcgattctcctgcctcagcctcccgagttgttgggattccaggcatgcatgaccaggctcagctaatttttgtttttttggtagagacggggtttcaccatattggccaggctggtctccaactcctaatctcaggtgatctacccaccttggcctcccaaattgctgggattacaggcgtgaaccactgctcccttccctgtccttatcgatgcctagggttaatcattaactacaaggaacccctagtgatggagttggccactccctctctgcgcgctcgctcgctcactgaggccgggcgaccaaaggtcgcccgacgcccgggctttgcccgggcggcctcagtgagcgagcgagcgcgcag

SEQ ID NO: 4029 - DNA, 1775 bp, synthetic construct
  source 1..1775: mol_type = other DNA
ctgcgcgctcgctcgctcactgaggccgcccgggcaaagcccgggcgtcgggcgacctttggtcgcccggcctcagtgagcgagcgagcgcgcagagagggagtgtagccatgctctaggaagatcaattcaattcacgcgtccacgttctgcttcactctccccatctcccccccctccccacccccaattttgtatttatttattttttaattattttgtgcagcgatgggggcggggggggggggcgcgcgccaggcggggcggggcggggcgaggggcggggcggggcgaggcggagaggtgcggcggcagccaatcagagcggcgcgctccgaaagtttccttttatggcgaggcggcggcggcggcggccctataaaaagcgaagcgcgcggcgggaagcttcgtttagtgaaccgtcagatcgcctggagacgccatccacgctgttttgacctccatagaagacaccgggaccgatccagcctccgcggattcgaatcccggccgggaacggtgcattggaacgcggattccccgtgccaagagtgacgtaagtaccgcctatagagtctataggcccacaaaaaatgctttcttcttttaatatacttttttgtttatcttatttctaatactttccctaatctctttctttcagggcaataatgatacaatgtatcatgcctctttgcaccattctaaagaataacagtgataatttctgggttaaggcaatagcaatatttctgcatataaatatttctgcatataaattgtaactgatgtaagaggtttcatattgctaatagcagctacaatccagctaccattctgcttttattttatggttgggataaggctggattattctgagtccaagctaggcccttttgctaatcatgttcatacctcttatcttcctcccacagctcctgggcaacgtgctggtctgtgtgctggcccatcactttggcaaagaattgggattcgaaccggtaccgagctctcccgcagaacaccatgcgctccacggaagcaggtcctcactttaatgctgtggccactgagaagtattaaagtgaggacctgcttctgaggagcgccttgacagcagccatgggagggcctcgaggggtggcatccctgtgacccctccccagtgcctctcctggccctggaagttgccactccagtgcccaccagccttgtcctaataaaattaagttgcatcattttgtctgactaggtgtccttctataatattatggggtggaggggggtggtatggagcaaggggcaagttgggaagacaacctgtagggcctgcggggtctattgggaaccaagctggagtgcagtggcacaatcttggctcactgcaatctccgcctcctgggttcaagcgattctcctgcctcagcctcccgagttgttgggattccaggcatgcatgaccaggctcagctaatttttgtttttttggtagagacggggtttcaccatattggccaggctggtctccaactcctaatctcaggtgatctacccaccttggcctcccaaattgctgggattacaggcgtgaaccactgctcccttccctgtccttatcgatgcctagggttaatcattaactacaaggaacccctagtgatggagttggccactccctctctgcgcgctcgctcgctcactgaggccgggcgaccaaaggtcgcccgacgcccgggctttgcccgggcggcctcagtgagcgagcgagcgcgcag

SEQ ID NO: 4030 - DNA, 1751 bp, synthetic construct
  source 1..1751: mol_type = other DNA
ctgcgcgctcgctcgctcactgaggccgcccgggcaaagcccgggcgtcgggcgacctttggtcgcccggcctcagtgagcgagcgagcgcgcagagagggagtgtagccatgctctaggaagatcaattcaattcacgcgtcgtgaggctccggtgcccgtcagtgggcagagcgcacatcgcccacagtccccgagaagttggggggaggggtcggcaattgaaccggtgcctagagaaggtggcgcggggtaaactgggaaagtgatgtcgtgtactggctccgcctttttcccgagggtgggggagaaccgtatataagtgcagtagtcgccgtgaacgttctttttcgcaacgggtttgccgccagaacacagaagcttcgtttagtgaaccgtcagatcgcctggagacgccatccacgctgttttgacctccatagaagacaccgggaccgatccagcctccgcggattcgaatcccggccgggaacggtgcattggaacgcggattccccgtgccaagagtgacgtaagtaccgcctatagagtctataggcccacaaaaaatgctttcttcttttaatatacttttttgtttatcttatttctaatactttccctaatctctttctttcagggcaataatgatacaatgtatcatgcctctttgcaccattctaaagaataacagtgataatttctgggttaaggcaatagcaatatttctgcatataaatatttctgcatataaattgtaactgatgtaagaggtttcatattgctaatagcagctacaatccagctaccattctgcttttattttatggttgggataaggctggattattctgagtccaagctaggcccttttgctaatcatgttcatacctcttatcttcctcccacagctcctgggcaacgtgctggtctgtgtgctggcccatcactttggcaaagaattgggattcgaaccggtaccgagctctcccgcagaacaccatgcgctccacggaagcaggtcctcactttaatgctgtggccactgagaagtattaaagtgaggacctgcttctgaggagcgccttgacagcagccatgggagggcctcgaggggtggcatccctgtgacccctccccagtgcctctcctggccctggaagttgccactccagtgcccaccagccttgtcctaataaaattaagttgcatcattttgtctgactaggtgtccttctataatattatggggtggaggggggtggtatggagcaaggggcaagttgggaagacaacctgtagggcctgcggggtctattgggaaccaagctggagtgcagtggcacaatcttggctcactgcaatctccgcctcctgggttcaagcgattctcctgcctcagcctcccgagttgttgggattccaggcatgcatgaccaggctcagctaatttttgtttttttggtagagacggggtttcaccatattggccaggctggtctccaactcctaatctcaggtgatctacccaccttggcctcccaaattgctgggattacaggcgtgaaccactgctcccttccctgtccttatcgatgcctagggttaatcattaactacaaggaacccctagtgatggagttggccactccctctctgcgcgctcgctcgctcactgaggccgggcgaccaaaggtcgcccgacgcccgggctttgcccgggcggcctcagtgagcgagcgagcgcgcag

SEQ ID NO: 4031 - DNA, 2015 bp, synthetic construct
  source 1..2015: mol_type = other DNA
ctgcgcgctcgctcgctcactgaggccgcccgggcaaagcccgggcgtcgggcgacctttggtcgcccggcctcagtgagcgagcgagcgcgcagagagggagtgtagccatgctctaggaagatcaattcaattcacgcgtgggtaggggaggcgcttttcccaaggcagtctggagcatgcgctttagcagccccgctgggcacttggcgctacacaagtggcctctggcctcgcacacattccacatccaccggtaggcgccaaccggctccgttctttggtggccccttcgcgccaccttctactcctcccctagtcaggaagttcccccccgccccgcagctcgcgtcgtgcaggacgtgacaaatggaagtagcacgtctcactagtctcgtgcagatggacagcaccgctgagcaatggaagcgggtaggcctttggggcagcggccaatagcagctttgctccttcgctttctgggctcagaggctgggaaggggtgggtccgggggcgggctcaggggcgggctcaggggcggggcgggcgcccgaaggtcctccggaggcccggcattctgcacgcttcaaaagcgcacgtctgccgcgctgttctcctcttcctcatctccgggcctttcgaagcttcgtttagtgaaccgtcagatcgcctggagacgccatccacgctgttttgacctccatagaagacaccgggaccgatccagcctccgcggattcgaatcccggccgggaacggtgcattggaacgcggattccccgtgccaagagtgacgtaagtaccgcctatagagtctataggcccacaaaaaatgctttcttcttttaatatacttttttgtttatcttatttctaatactttccctaatctctttctttcagggcaataatgatacaatgtatcatgcctctttgcaccattctaaagaataacagtgataatttctgggttaaggcaatagcaatatttctgcatataaatatttctgcatataaattgtaactgatgtaagaggtttcatattgctaatagcagctacaatccagctaccattctgcttttattttatggttgggataaggctggattattctgagtccaagctaggcccttttgctaatcatgttcatacctcttatcttcctcccacagctcctgggcaacgtgctggtctgtgtgctggcccatcactttggcaaagaattgggattcgaaccggtaccgagctctcccgcagaacaccatgcgctccacggaagcaggtcctcactttaatgctgtggccactgagaagtattaaagtgaggacctgcttctgaggagcgccttgacagcagccatgggagggcctcgaggggtggcatccctgtgacccctccccagtgcctctcctggccctggaagttgccactccagtgcccaccagccttgtcctaataaaattaagttgcatcattttgtctgactaggtgtccttctataatattatggggtggaggggggtggtatggagcaaggggcaagttgggaagacaacctgtagggcctgcggggtctattgggaaccaagctggagtgcagtggcacaatcttggctcactgcaatctccgcctcctgggttcaagcgattctcctgcctcagcctcccgagttgttgggattccaggcatgcatgaccaggctcagctaatttttgtttttttggtagagacggggtttcaccatattggccaggctggtctccaactcctaatctcaggtgatctacccaccttggcctcccaaattgctgggattacaggcgtgaaccactgctcccttccctgtccttatcgatgcctagggttaatcattaactacaaggaacccctagtgatggagttggccactccctctctgcgcgctcgctcgctcactgaggccgggcgaccaaaggtcgcccgacgcccgggctttgcccgggcggcctcagtgagcgagcgagcgcgcag

SEQ ID NO: 4032 - DNA, 1599 bp, synthetic construct
  source 1..1599: mol_type = other DNA
ctgcgcgctcgctcgctcactgaggccgcccgggcaaagcccgggcgtcgggcgacctttggtcgcccggcctcagtgagcgagcgagcgcgcagagagggagtgtagccatgctctaggaagatcaattcaattcacgcgtccctaatgggccaggcggcaggggttgagaggtaggggagatgggctctgagactataaagccagcgggggcccagcagccctcaagcttcgtttagtgaaccgtcagatcgcctggagacgccatccacgctgttttgacctccatagaagacaccgggaccgatccagcctccgcggattcgaatcccggccgggaacggtgcattggaacgcggattccccgtgccaagagtgacgtaagtaccgcctatagagtctataggcccacaaaaaatgctttcttcttttaatatacttttttgtttatcttatttctaatactttccctaatctctttctttcagggcaataatgatacaatgtatcatgcctctttgcaccattctaaagaataacagtgataatttctgggttaaggcaatagcaatatttctgcatataaatatttctgcatataaattgtaactgatgtaagaggtttcatattgctaatagcagctacaatccagctaccattctgcttttattttatggttgggataaggctggattattctgagtccaagctaggcccttttgctaatcatgttcatacctcttatcttcctcccacagctcctgggcaacgtgctggtctgtgtgctggcccatcactttggcaaagaattgggattcgaaccggtaccgagctctcccgcagaacaccatgcgctccacggaagcaggtcctcactttaatgctgtggccactgagaagtattaaagtgaggacctgcttctgaggagcgccttgacagcagccatgggagggcctcgaggggtggcatccctgtgacccctccccagtgcctctcctggccctggaagttgccactccagtgcccaccagccttgtcctaataaaattaagttgcatcattttgtctgactaggtgtccttctataatattatggggtggaggggggtggtatggagcaaggggcaagttgggaagacaacctgtagggcctgcggggtctattgggaaccaagctggagtgcagtggcacaatcttggctcactgcaatctccgcctcctgggttcaagcgattctcctgcctcagcctcccgagttgttgggattccaggcatgcatgaccaggctcagctaatttttgtttttttggtagagacggggtttcaccatattggccaggctggtctccaactcctaatctcaggtgatctacccaccttggcctcccaaattgctgggattacaggcgtgaaccactgctcccttccctgtccttatcgatgcctagggttaatcattaactacaaggaacccctagtgatggagttggccactccctctctgcgcgctcgctcgctcactgaggccgggcgaccaaaggtcgcccgacgcccgggctttgcccgggcggcctcagtgagcgagcgagcgcgcag

SEQ ID NO: 4033 - DNA, 2173 bp, synthetic construct
  source 1..2173: mol_type = other DNA
ctgcgcgctcgctcgctcactgaggccgcccgggcaaagcccgggcgtcgggcgacctttggtcgcccggcctcagtgagcgagcgagcgcgcagagagggagtgtagccatgctctaggaagatcaattcaattcacgcgtcgcgtggggttatttctctactttcgtgtctctgagtgtgcttccagtgcccccctccccccaaaaaatgccttctgagttgaatatcaacactacaaacctagtatctgcagagggccctgcgtatgagtgcaagtgggttttaggaccaggatgaggcggggtgggggtgcctacctgacgaccgaccccgacccactggacaagcacccaacccccattccccaaattgcgcatcccctatcagagagggggaggggaaacaggatgcggcgaggcgcgtgcgcactgccagcttcagcaccgcggacagtgccttcgcccccgcctggcggcgcgcgccaccgccgcctcagcactgaaggcgcgctgacgtcactcgccggtcccccgcaaactccccttcccggccaccttggtcgcgtccgcgccgccgccggcccagccggaccgcaccacgcgaggcgcgagataggggggcacgggcgcgaccatctgcgctgcggcgccggcgactcagcgctgcctcagtctgcggtgggcagcggaggagtcgtgtcgtgcctgagagcgcagctgtgctcctgggcaccgcgcagtccgcccccgcggctcctggccagaccacccctaggaccccctgccccaagtcgcagccaagcttcgtttagtgaaccgtcagatcgcctggagacgccatccacgctgttttgacctccatagaagacaccgggaccgatccagcctccgcggattcgaatcccggccgggaacggtgcattggaacgcggattccccgtgccaagagtgacgtaagtaccgcctatagagtctataggcccacaaaaaatgctttcttcttttaatatacttttttgtttatcttatttctaatactttccctaatctctttctttcagggcaataatgatacaatgtatcatgcctctttgcaccattctaaagaataacagtgataatttctgggttaaggcaatagcaatatttctgcatataaatatttctgcatataaattgtaactgatgtaagaggtttcatattgctaatagcagctacaatccagctaccattctgcttttattttatggttgggataaggctggattattctgagtccaagctaggcccttttgctaatcatgttcatacctcttatcttcctcccacagctcctgggcaacgtgctggtctgtgtgctggcccatcactttggcaaagaattgggattcgaaccggtaccgagctctcccgcagaacaccatgcgctccacggaagcaggtcctcactttaatgctgtggccactgagaagtattaaagtgaggacctgcttctgaggagcgccttgacagcagccatgggagggcctcgaggggtggcatccctgtgacccctccccagtgcctctcctggccctggaagttgccactccagtgcccaccagccttgtcctaataaaattaagttgcatcattttgtctgactaggtgtccttctataatattatggggtggaggggggtggtatggagcaaggggcaagttgggaagacaacctgtagggcctgcggggtctattgggaaccaagctggagtgcagtggcacaatcttggctcactgcaatctccgcctcctgggttcaagcgattctcctgcctcagcctcccgagttgttgggattccaggcatgcatgaccaggctcagctaatttttgtttttttggtagagacggggtttcaccatattggccaggctggtctccaactcctaatctcaggtgatctacccaccttggcctcccaaattgctgggattacaggcgtgaaccactgctcccttccctgtccttatcgatgcctagggttaatcattaactacaaggaacccctagtgatggagttggccactccctctctgcgcgctcgctcgctcactgaggccgggcgaccaaaggtcgcccgacgcccgggctttgcccgggcggcctcagtgagcgagcgagcgcgcag

SEQ ID NO: 4034 - DNA, 2072 bp, synthetic construct
  source 1..2072: mol_type = other DNA
ctgcgcgctcgctcgctcactgaggccgcccgggcaaagcccgggcgtcgggcgacctttggtcgcccggcctcagtgagcgagcgagcgcgcagagagggagtgtagccatgctctaggaagatcaattcaattcacgcgttagtatctgcagagggccctgcgtatgagtgcaagtgggttttaggaccaggatgaggcggggtgggggtgcctacctgacgaccgaccccgacccactggacaagcacccaacccccattccccaaattgcgcatcccctatcagagagggggaggggaaacaggatgcggcgaggcgcgtgcgcactgccagcttcagcaccgcggacagtgccttcgcccccgcctggcggcgcgcgccaccgccgcctcagcactgaaggcgcgctgacgtcactcgccggtcccccgcaaactccccttcccggccaccttggtcgcgtccgcgccgccgccggcccagccggaccgcaccacgcgaggcgcgagataggggggcacgggcgcgaccatctgcgctgcggcgccggcgactcagcgctgcctcagtctgcggtgggcagcggaggagtcgtgtcgtgcctgagagcgcagctgtgctcctgggcaccgcgcagtccgcccccgcggctcctggccagaccacccctaggaccccctgccccaagtcgcagccaagcttcgtttagtgaaccgtcagatcgcctggagacgccatccacgctgttttgacctccatagaagacaccgggaccgatccagcctccgcggattcgaatcccggccgggaacggtgcattggaacgcggattccccgtgccaagagtgacgtaagtaccgcctatagagtctataggcccacaaaaaatgctttcttcttttaatatacttttttgtttatcttatttctaatactttccctaatctctttctttcagggcaataatgatacaatgtatcatgcctctttgcaccattctaaagaataacagtgataatttctgggttaaggcaatagcaatatttctgcatataaatatttctgcatataaattgtaactgatgtaagaggtttcatattgctaatagcagctacaatccagctaccattctgcttttattttatggttgggataaggctggattattctgagtccaagctaggcccttttgctaatcatgttcatacctcttatcttcctcccacagctcctgggcaacgtgctggtctgtgtgctggcccatcactttggcaaagaattgggattcgaaccggtaccgagctctcccgcagaacaccatgcgctccacggaagcaggtcctcactttaatgctgtggccactgagaagtattaaagtgaggacctgcttctgaggagcgccttgacagcagccatgggagggcctcgaggggtggcatccctgtgacccctccccagtgcctctcctggccctggaagttgccactccagtgcccaccagccttgtcctaataaaattaagttgcatcattttgtctgactaggtgtccttctataatattatggggtggaggggggtggtatggagcaaggggcaagttgggaagacaacctgtagggcctgcggggtctattgggaaccaagctggagtgcagtggcacaatcttggctcactgcaatctccgcctcctgggttcaagcgattctcctgcctcagcctcccgagttgttgggattccaggcatgcatgaccaggctcagctaatttttgtttttttggtagagacggggtttcaccatattggccaggctggtctccaactcctaatctcaggtgatctacccaccttggcctcccaaattgctgggattacaggcgtgaaccactgctcccttccctgtccttatcgatgcctagggttaatcattaactacaaggaacccctagtgatggagttggccactccctctctgcgcgctcgctcgctcactgaggccgggcgaccaaaggtcgcccgacgcccgggctttgcccgggcggcctcagtgagcgagcgagcgcgcag

SEQ ID NO: 4035 - DNA, 2169 bp, synthetic construct
  source 1..2169: mol_type = other DNA
ctgcgcgctcgctcgctcactgaggccgcccgggcaaagcccgggcgtcgggcgacctttggtcgcccggcctcagtgagcgagcgagcgcgcagagagggagtgtagccatgctctaggaagatcaattcaattcacgcgtcgacattgattattgactagttattaatagtaatcaattacggggtcattagttcatagcccatatatggagttccgcgttacataacttacggtaaatggcccgcctggctgaccgcccaacgacccccgcccattgacgtcaataatgacgtatgttcccatagtaacgccaatagggactttccattgacgtcaatgggtggagtatttacggtaaactgcccacttggcagtacatcaagtgtatcatatgccaagtacgccccctattgacgtcaatgacggtaaatggcccgcctggcattatgcccagtacatgaccttatgggactttcctacttggcagtacatctacgtattagtcatcgctattaccatgtcgaggccacgttctgcttcactctccccatctcccccccctccccacccccaattttgtatttatttattttttaattattttgtgcagcgatgggggcggggggggggggcgcgcgccaggcggggcggggcggggcgaggggcggggcggggcgaggcggagaggtgcggcggcagccaatcagagcggcgcgctccgaaagtttccttttatggcgaggcggcggcggcggcggccctataaaaagcgaagcgcgcggcgggcgggagcaagcttcgtttagtgaaccgtcagatcacctggagacaccatccacactgttttgacctccatagaagacaccaggaccaatccagcctccacagattccaatcccagccaggaacagtgcattggaacacagattccccttgccaagagtgacgtaagtaccgcctatagagtctataggcccacaaaaaatgctttcttcttttaatatacttttttgtttatcttatttctaatactttccctaatctctttctttcagggcaataatgatacaatgtatcatgcctctttgcaccattctaaagaataacagtgataatttctgggttaaggcaatagcaatatttctgcatataaatatttctgcatataaattgtaactgatgtaagaggtttcatattgctaatagcagctacaatccagctaccattctgcttttattttatggttgggataaggctggattattctgagtccaagctaggcccttttgctaatcatgttcatacctcttatcttcctcccacagctcctgggcaacctgctggtctgtgtgctggcccatcactttggcaaagaattgggattcgaaccggtaccgagctctcccgcagaacaccatgcgctccacggaagcaggtcctcactttaatgctgtggccactgagaagtattaaagtgaggacctgcttctgaggagcgccttgacagcagccatgggagggcctcgaggggtggcatccctgtgacccctccccagtgcctctcctggccctggaagttgccactccagtgcccaccagccttgtcctaataaaattaagttgcatcattttgtctgactaggtgtccttctataatattatggggtggaggggggtggtatggagcaaggggcaagttgggaagacaacctgtagggcctgcggggtctattgggaaccaagctggagtgcagtggcacaatcttggctcactgcaatctccgcctcctgggttcaagcgattctcctgcctcagcctcccgagttgttgggattccaggcatgcatgaccaggctcagctaatttttgtttttttggtagagacggggtttcaccatattggccaggctggtctccaactcctaatctcaggtgatctacccaccttggcctcccaaattgctgggattacaggcgtgaaccactgctcccttccctgtccttatcgatgcctagggttaatcattaactacaaggaacccctagtgatggagttggccactccctctctgcgcgctcgctcgctcactgaggccgggcgaccaaaggtcgcccgacgcccgggctttgcccgggcggcctcagtgagcgagcgagcgcgcag

SEQ ID NO: 4036 - DNA, 1775 bp, synthetic construct
  source 1..1775: mol_type = other DNA
ctgcgcgctcgctcgctcactgaggccgcccgggcaaagcccgggcgtcgggcgacctttggtcgcccggcctcagtgagcgagcgagcgcgcagagagggagtgtagccatgctctaggaagatcaattcaattcacgcgtccacgttctgcttcactctccccatctcccccccctccccacccccaattttgtatttatttattttttaattattttgtgcagcgatgggggcggggggggggggcgcgcgccaggcggggcggggcggggcgaggggcggggcggggcgaggcggagaggtgcggcggcagccaatcagagcggcgcgctccgaaagtttccttttatggcgaggcggcggcggcggcggccctataaaaagcgaagcgcgcggcgggaagcttcgtttagtgaaccgtcagatcacctggagacaccatccacactgttttgacctccatagaagacaccaggaccaatccagcctccacagattccaatcccagccaggaacagtgcattggaacacagattccccttgccaagagtgacgtaagtaccgcctatagagtctataggcccacaaaaaatgctttcttcttttaatatacttttttgtttatcttatttctaatactttccctaatctctttctttcagggcaataatgatacaatgtatcatgcctctttgcaccattctaaagaataacagtgataatttctgggttaaggcaatagcaatatttctgcatataaatatttctgcatataaattgtaactgatgtaagaggtttcatattgctaatagcagctacaatccagctaccattctgcttttattttatggttgggataaggctggattattctgagtccaagctaggcccttttgctaatcatgttcatacctcttatcttcctcccacagctcctgggcaacctgctggtctgtgtgctggcccatcactttggcaaagaattgggattcgaaccggtaccgagctctcccgcagaacaccatgcgctccacggaagcaggtcctcactttaatgctgtggccactgagaagtattaaagtgaggacctgcttctgaggagcgccttgacagcagccatgggagggcctcgaggggtggcatccctgtgacccctccccagtgcctctcctggccctggaagttgccactccagtgcccaccagccttgtcctaataaaattaagttgcatcattttgtctgactaggtgtccttctataatattatggggtggaggggggtggtatggagcaaggggcaagttgggaagacaacctgtagggcctgcggggtctattgggaaccaagctggagtgcagtggcacaatcttggctcactgcaatctccgcctcctgggttcaagcgattctcctgcctcagcctcccgagttgttgggattccaggcatgcatgaccaggctcagctaatttttgtttttttggtagagacggggtttcaccatattggccaggctggtctccaactcctaatctcaggtgatctacccaccttggcctcccaaattgctgggattacaggcgtgaaccactgctcccttccctgtccttatcgatgcctagggttaatcattaactacaaggaacccctagtgatggagttggccactccctctctgcgcgctcgctcgctcactgaggccgggcgaccaaaggtcgcccgacgcccgggctttgcccgggcggcctcagtgagcgagcgagcgcgcag

SEQ ID NO: 4037 - DNA, 1751 bp, synthetic construct
  source 1..1751: mol_type = other DNA
ctgcgcgctcgctcgctcactgaggccgcccgggcaaagcccgggcgtcgggcgacctttggtcgcccggcctcagtgagcgagcgagcgcgcagagagggagtgtagccatgctctaggaagatcaattcaattcacgcgtcgtgaggctccggtgcccgtcagtgggcagagcgcacatcgcccacagtccccgagaagttggggggaggggtcggcaattgaaccggtgcctagagaaggtggcgcggggtaaactgggaaagtgatgtcgtgtactggctccgcctttttcccgagggtgggggagaaccgtatataagtgcagtagtcgccgtgaacgttctttttcgcaacgggtttgccgccagaacacagaagcttcgtttagtgaaccgtcagatcacctggagacaccatccacactgttttgacctccatagaagacaccaggaccaatccagcctccacagattccaatcccagccaggaacagtgcattggaacacagattccccttgccaagagtgacgtaagtaccgcctatagagtctataggcccacaaaaaatgctttcttcttttaatatacttttttgtttatcttatttctaatactttccctaatctctttctttcagggcaataatgatacaatgtatcatgcctctttgcaccattctaaagaataacagtgataatttctgggttaaggcaatagcaatatttctgcatataaatatttctgcatataaattgtaactgatgtaagaggtttcatattgctaatagcagctacaatccagctaccattctgcttttattttatggttgggataaggctggattattctgagtccaagctaggcccttttgctaatcatgttcatacctcttatcttcctcccacagctcctgggcaacctgctggtctgtgtgctggcccatcactttggcaaagaattgggattcgaaccggtaccgagctctcccgcagaacaccatgcgctccacggaagcaggtcctcactttaatgctgtggccactgagaagtattaaagtgaggacctgcttctgaggagcgccttgacagcagccatgggagggcctcgaggggtggcatccctgtgacccctccccagtgcctctcctggccctggaagttgccactccagtgcccaccagccttgtcctaataaaattaagttgcatcattttgtctgactaggtgtccttctataatattatggggtggaggggggtggtatggagcaaggggcaagttgggaagacaacctgtagggcctgcggggtctattgggaaccaagctggagtgcagtggcacaatcttggctcactgcaatctccgcctcctgggttcaagcgattctcctgcctcagcctcccgagttgttgggattccaggcatgcatgaccaggctcagctaatttttgtttttttggtagagacggggtttcaccatattggccaggctggtctccaactcctaatctcaggtgatctacccaccttggcctcccaaattgctgggattacaggcgtgaaccactgctcccttccctgtccttatcgatgcctagggttaatcattaactacaaggaacccctagtgatggagttggccactccctctctgcgcgctcgctcgctcactgaggccgggcgaccaaaggtcgcccgacgcccgggctttgcccgggcggcctcagtgagcgagcgagcgcgcag

SEQ ID NO: 4038 - DNA, 2015 bp, synthetic construct
  source 1..2015: mol_type = other DNA
ctgcgcgctcgctcgctcactgaggccgcccgggcaaagcccgggcgtcgggcgacctttggtcgcccggcctcagtgagcgagcgagcgcgcagagagggagtgtagccatgctctaggaagatcaattcaattcacgcgtgggtaggggaggcgcttttcccaaggcagtctggagcatgcgctttagcagccccgctgggcacttggcgctacacaagtggcctctggcctcgcacacattccacatccaccggtaggcgccaaccggctccgttctttggtggccccttcgcgccaccttctactcctcccctagtcaggaagttcccccccgccccgcagctcgcgtcgtgcaggacgtgacaaatggaagtagcacgtctcactagtctcgtgcagatggacagcaccgctgagcaatggaagcgggtaggcctttggggcagcggccaatagcagctttgctccttcgctttctgggctcagaggctgggaaggggtgggtccgggggcgggctcaggggcgggctcaggggcggggcgggcgcccgaaggtcctccggaggcccggcattctgcacgcttcaaaagcgcacgtctgccgcgctgttctcctcttcctcatctccgggcctttcgaagcttcgtttagtgaaccgtcagatcacctggagacaccatccacactgttttgacctccatagaagacaccaggaccaatccagcctccacagattccaatcccagccaggaacagtgcattggaacacagattccccttgccaagagtgacgtaagtaccgcctatagagtctataggcccacaaaaaatgctttcttcttttaatatacttttttgtttatcttatttctaatactttccctaatctctttctttcagggcaataatgatacaatgtatcatgcctctttgcaccattctaaagaataacagtgataatttctgggttaaggcaatagcaatatttctgcatataaatatttctgcatataaattgtaactgatgtaagaggtttcatattgctaatagcagctacaatccagctaccattctgcttttattttatggttgggataaggctggattattctgagtccaagctaggcccttttgctaatcatgttcatacctcttatcttcctcccacagctcctgggcaacctgctggtctgtgtgctggcccatcactttggcaaagaattgggattcgaaccggtaccgagctctcccgcagaacaccatgcgctccacggaagcaggtcctcactttaatgctgtggccactgagaagtattaaagtgaggacctgcttctgaggagcgccttgacagcagccatgggagggcctcgaggggtggcatccctgtgacccctccccagtgcctctcctggccctggaagttgccactccagtgcccaccagccttgtcctaataaaattaagttgcatcattttgtctgactaggtgtccttctataatattatggggtggaggggggtggtatggagcaaggggcaagttgggaagacaacctgtagggcctgcggggtctattgggaaccaagctggagtgcagtggcacaatcttggctcactgcaatctccgcctcctgggttcaagcgattctcctgcctcagcctcccgagttgttgggattccaggcatgcatgaccaggctcagctaatttttgtttttttggtagagacggggtttcaccatattggccaggctggtctccaactcctaatctcaggtgatctacccaccttggcctcccaaattgctgggattacaggcgtgaaccactgctcccttccctgtccttatcgatgcctagggttaatcattaactacaaggaacccctagtgatggagttggccactccctctctgcgcgctcgctcgctcactgaggccgggcgaccaaaggtcgcccgacgcccgggctttgcccgggcggcctcagtgagcgagcgagcgcgcag

SEQ ID NO: 4039 - DNA, 1599 bp, synthetic construct
  source 1..1599: mol_type = other DNA
ctgcgcgctcgctcgctcactgaggccgcccgggcaaagcccgggcgtcgggcgacctttggtcgcccggcctcagtgagcgagcgagcgcgcagagagggagtgtagccatgctctaggaagatcaattcaattcacgcgtccctaatgggccaggcggcaggggttgagaggtaggggagatgggctctgagactataaagccagcgggggcccagcagccctcaagcttcgtttagtgaaccgtcagatcacctggagacaccatccacactgttttgacctccatagaagacaccaggaccaatccagcctccacagattccaatcccagccaggaacagtgcattggaacacagattccccttgccaagagtgacgtaagtaccgcctatagagtctataggcccacaaaaaatgctttcttcttttaatatacttttttgtttatcttatttctaatactttccctaatctctttctttcagggcaataatgatacaatgtatcatgcctctttgcaccattctaaagaataacagtgataatttctgggttaaggcaatagcaatatttctgcatataaatatttctgcatataaattgtaactgatgtaagaggtttcatattgctaatagcagctacaatccagctaccattctgcttttattttatggttgggataaggctggattattctgagtccaagctaggcccttttgctaatcatgttcatacctcttatcttcctcccacagctcctgggcaacctgctggtctgtgtgctggcccatcactttggcaaagaattgggattcgaaccggtaccgagctctcccgcagaacaccatgcgctccacggaagcaggtcctcactttaatgctgtggccactgagaagtattaaagtgaggacctgcttctgaggagcgccttgacagcagccatgggagggcctcgaggggtggcatccctgtgacccctccccagtgcctctcctggccctggaagttgccactccagtgcccaccagccttgtcctaataaaattaagttgcatcattttgtctgactaggtgtccttctataatattatggggtggaggggggtggtatggagcaaggggcaagttgggaagacaacctgtagggcctgcggggtctattgggaaccaagctggagtgcagtggcacaatcttggctcactgcaatctccgcctcctgggttcaagcgattctcctgcctcagcctcccgagttgttgggattccaggcatgcatgaccaggctcagctaatttttgtttttttggtagagacggggtttcaccatattggccaggctggtctccaactcctaatctcaggtgatctacccaccttggcctcccaaattgctgggattacaggcgtgaaccactgctcccttccctgtccttatcgatgcctagggttaatcattaactacaaggaacccctagtgatggagttggccactccctctctgcgcgctcgctcgctcactgaggccgggcgaccaaaggtcgcccgacgcccgggctttgcccgggcggcctcagtgagcgagcgagcgcgcag

SEQ ID NO: 4040 - DNA, 2173 bp, synthetic construct
  source 1..2173: mol_type = other DNA
ctgcgcgctcgctcgctcactgaggccgcccgggcaaagcccgggcgtcgggcgacctttggtcgcccggcctcagtgagcgagcgagcgcgcagagagggagtgtagccatgctctaggaagatcaattcaattcacgcgtcgcgtggggttatttctctactttcgtgtctctgagtgtgcttccagtgcccccctccccccaaaaaatgccttctgagttgaatatcaacactacaaacctagtatctgcagagggccctgcgtatgagtgcaagtgggttttaggaccaggatgaggcggggtgggggtgcctacctgacgaccgaccccgacccactggacaagcacccaacccccattccccaaattgcgcatcccctatcagagagggggaggggaaacaggatgcggcgaggcgcgtgcgcactgccagcttcagcaccgcggacagtgccttcgcccccgcctggcggcgcgcgccaccgccgcctcagcactgaaggcgcgctgacgtcactcgccggtcccccgcaaactccccttcccggccaccttggtcgcgtccgcgccgccgccggcccagccggaccgcaccacgcgaggcgcgagataggggggcacgggcgcgaccatctgcgctgcggcgccggcgactcagcgctgcctcagtctgcggtgggcagcggaggagtcgtgtcgtgcctgagagcgcagctgtgctcctgggcaccgcgcagtccgcccccgcggctcctggccagaccacccctaggaccccctgccccaagtcgcagccaagcttcgtttagtgaaccgtcagatcacctggagacaccatccacactgttttgacctccatagaagacaccaggaccaatccagcctccacagattccaatcccagccaggaacagtgcattggaacacagattccccttgccaagagtgacgtaagtaccgcctatagagtctataggcccacaaaaaatgctttcttcttttaatatacttttttgtttatcttatttctaatactttccctaatctctttctttcagggcaataatgatacaatgtatcatgcctctttgcaccattctaaagaataacagtgataatttctgggttaaggcaatagcaatatttctgcatataaatatttctgcatataaattgtaactgatgtaagaggtttcatattgctaatagcagctacaatccagctaccattctgcttttattttatggttgggataaggctggattattctgagtccaagctaggcccttttgctaatcatgttcatacctcttatcttcctcccacagctcctgggcaacctgctggtctgtgtgctggcccatcactttggcaaagaattgggattcgaaccggtaccgagctctcccgcagaacaccatgcgctccacggaagcaggtcctcactttaatgctgtggccactgagaagtattaaagtgaggacctgcttctgaggagcgccttgacagcagccatgggagggcctcgaggggtggcatccctgtgacccctccccagtgcctctcctggccctggaagttgccactccagtgcccaccagccttgtcctaataaaattaagttgcatcattttgtctgactaggtgtccttctataatattatggggtggaggggggtggtatggagcaaggggcaagttgggaagacaacctgtagggcctgcggggtctattgggaaccaagctggagtgcagtggcacaatcttggctcactgcaatctccgcctcctgggttcaagcgattctcctgcctcagcctcccgagttgttgggattccaggcatgcatgaccaggctcagctaatttttgtttttttggtagagacggggtttcaccatattggccaggctggtctccaactcctaatctcaggtgatctacccaccttggcctcccaaattgctgggattacaggcgtgaaccactgctcccttccctgtccttatcgatgcctagggttaatcattaactacaaggaacccctagtgatggagttggccactccctctctgcgcgctcgctcgctcactgaggccgggcgaccaaaggtcgcccgacgcccgggctttgcccgggcggcctcagtgagcgagcgagcgcgcag

SEQ ID NO: 4041 - DNA, 2072 bp, synthetic construct
  source 1..2072: mol_type = other DNA
ctgcgcgctcgctcgctcactgaggccgcccgggcaaagcccgggcgtcgggcgacctttggtcgcccggcctcagtgagcgagcgagcgcgcagagagggagtgtagccatgctctaggaagatcaattcaattcacgcgttagtatctgcagagggccctgcgtatgagtgcaagtgggttttaggaccaggatgaggcggggtgggggtgcctacctgacgaccgaccccgacccactggacaagcacccaacccccattccccaaattgcgcatcccctatcagagagggggaggggaaacaggatgcggcgaggcgcgtgcgcactgccagcttcagcaccgcggacagtgccttcgcccccgcctggcggcgcgcgccaccgccgcctcagcactgaaggcgcgctgacgtcactcgccggtcccccgcaaactccccttcccggccaccttggtcgcgtccgcgccgccgccggcccagccggaccgcaccacgcgaggcgcgagataggggggcacgggcgcgaccatctgcgctgcggcgccggcgactcagcgctgcctcagtctgcggtgggcagcggaggagtcgtgtcgtgcctgagagcgcagctgtgctcctgggcaccgcgcagtccgcccccgcggctcctggccagaccacccctaggaccccctgccccaagtcgcagccaagcttcgtttagtgaaccgtcagatcacctggagacaccatccacactgttttgacctccatagaagacaccaggaccaatccagcctccacagattccaatcccagccaggaacagtgcattggaacacagattccccttgccaagagtgacgtaagtaccgcctatagagtctataggcccacaaaaaatgctttcttcttttaatatacttttttgtttatcttatttctaatactttccctaatctctttctttcagggcaataatgatacaatgtatcatgcctctttgcaccattctaaagaataacagtgataatttctgggttaaggcaatagcaatatttctgcatataaatatttctgcatataaattgtaactgatgtaagaggtttcatattgctaatagcagctacaatccagctaccattctgcttttattttatggttgggataaggctggattattctgagtccaagctaggcccttttgctaatcatgttcatacctcttatcttcctcccacagctcctgggcaacctgctggtctgtgtgctggcccatcactttggcaaagaattgggattcgaaccggtaccgagctctcccgcagaacaccatgcgctccacggaagcaggtcctcactttaatgctgtggccactgagaagtattaaagtgaggacctgcttctgaggagcgccttgacagcagccatgggagggcctcgaggggtggcatccctgtgacccctccccagtgcctctcctggccctggaagttgccactccagtgcccaccagccttgtcctaataaaattaagttgcatcattttgtctgactaggtgtccttctataatattatggggtggaggggggtggtatggagcaaggggcaagttgggaagacaacctgtagggcctgcggggtctattgggaaccaagctggagtgcagtggcacaatcttggctcactgcaatctccgcctcctgggttcaagcgattctcctgcctcagcctcccgagttgttgggattccaggcatgcatgaccaggctcagctaatttttgtttttttggtagagacggggtttcaccatattggccaggctggtctccaactcctaatctcaggtgatctacccaccttggcctcccaaattgctgggattacaggcgtgaaccactgctcccttccctgtccttatcgatgcctagggttaatcattaactacaaggaacccctagtgatggagttggccactccctctctgcgcgctcgctcgctcactgaggccgggcgaccaaaggtcgcccgacgcccgggctttgcccgggcggcctcagtgagcgagcgagcgcgcag

SEQ ID NO: 4042 - DNA, 566 bp, Homo sapiens
  source 1..566: mol_type = genomic DNA
tcagatcgcctggagacgccatccacgctgttttgacctccatagaagacaccgggaccgatccagcctccgcggattcgaatcccggccgggaacggtgcattggaacgcggattccccgtgccaagagtgacgtaagtaccgcctatagagtctataggcccacaaaaaatgctttcttcttttaatatacttttttgtttatcttatttctaatactttccctaatctctttctttcagggcaataatgatacaatgtatcatgcctctttgcaccattctaaagaataacagtgataatttctgggttaaggcaatagcaatatttctgcatataaatatttctgcatataaattgtaactgatgtaagaggtttcatattgctaatagcagctacaatccagctaccattctgcttttattttatggttgggataaggctggattattctgagtccaagctaggcccttttgctaatcatgttcatacctcttatcttcctcccacagctcctgggcaacgtgctggtctgtgtgctggcccatcactttggcaaagaatt

SEQ ID NO: 4043 - DNA, 566 bp, Homo sapiens
  source 1..566: mol_type = genomic DNA
tcagatcacctggagacaccatccacactgttttgacctccatagaagacaccaggaccaatccagcctccacagattccaatcccagccaggaacagtgcattggaacacagattccccttgccaagagtgacgtaagtaccgcctatagagtctataggcccacaaaaaatgctttcttcttttaatatacttttttgtttatcttatttctaatactttccctaatctctttctttcagggcaataatgatacaatgtatcatgcctctttgcaccattctaaagaataacagtgataatttctgggttaaggcaatagcaatatttctgcatataaatatttctgcatataaattgtaactgatgtaagaggtttcatattgctaatagcagctacaatccagctaccattctgcttttattttatggttgggataaggctggattattctgagtccaagctaggcccttttgctaatcatgttcatacctcttatcttcctcccacagctcctgggcaacctgctggtctgtgtgctggcccatcactttggcaaagaatt

SEQ ID NO: 4044 - DNA, 379 bp, Homo sapiens
  source 1..379: mol_type = genomic DNA
gtaagtaccgcctatagagtctataggcccacaaaaaatgctttcttcttttaatatacttttttgtttatcttatttctaatactttccctaatctctttctttcagggcaataatgatacaatgtatcatgcctctttgcaccattctaaagaataacagtgataatttctgggttaaggcaatagcaatatttctgcatataaatatttctgcatataaattgtaactgatgtaagaggtttcatattgctaatagcagctacaatccagctaccattctgcttttattttatggttgggataaggctggattattctgagtccaagctaggcccttttgctaatcatgttcatacctcttatcttcctcccacag

SEQ ID NO: 4045 - DNA, 134 bp, Homo sapiens
  source 1..134: mol_type = genomic DNA
tcagatcgcctggagacgccatccacgctgttttgacctccatagaagacaccgggaccgatccagcctccgcggattcgaatcccggccgggaacggtgcattggaacgcggattccccgtgccaagagtgac

SEQ ID NO: 4046 - DNA, 134 bp, Homo sapiens
  source 1..134: mol_type = genomic DNA
tcagatcacctggagacaccatccacactgttttgacctccatagaagacaccaggaccaatccagcctccacagattccaatcccagccaggaacagtgcattggaacacagattccccttgccaagagtgac

SEQ ID NO: 4047 - DNA, 53 bp, Homo sapiens
  source 1..53: mol_type = genomic DNA
ctcctgggcaacgtgctggtctgtgtgctggcccatcactttggcaaagaatt

SEQ ID NO: 4048 - DNA, 53 bp, Homo sapiens
  source 1..53: mol_type = genomic DNA
ctcctgggcaacctgctggtctgtgtgctggcccatcactttggcaaagaatt

SEQ ID NO: 4049-4678 - skipped (630 entries)

SEQ ID NO: 4679 - DNA, 22 bp, synthetic construct
  source 1..22: mol_type = other DNA
atacatacttctttacattcca

SEQ ID NO: 4680-5013 - skipped (334 entries)

SEQ ID NO: 5014 - DNA, 54 bp, synthetic construct
  source 1..54: mol_type = other DNA
gtgctgggcggggggcggcgggccctcccgcagaacaccatgcgctccacggaa

SEQ ID NO: 5015-5021 - skipped (7 entries)

SEQ ID NO: 5022 - DNA, 158 bp, synthetic construct
  source 1..158: mol_type = other DNA
gtgctgggcggggggcggcgggccctcccgcagaacaccatgcgctcttcggaacccttaactgatctgttaacctgtgacctggttaacagatgagttaagggttctgtggagcgccttgacagcagccatgggagggccgccccctacctcagtga

SEQ ID NO: 5023 - DNA, 21 bp, synthetic construct
  source 1..21: mol_type = other DNA
cccttaactgatctgttaacc

SEQ ID NO: 5024 - DNA, 21 bp, synthetic construct
  source 1..21: mol_type = other DNA
ttaacagatgagttaagggtt

SEQ ID NO: 5025 - protein, 19 aa, synthetic construct
PLNGDVHLYAQAQTGCVKN

SEQ ID NO: 5026 - protein, 19 aa, synthetic construct
PLNGDVHLYAQAQTGWVKN

SEQ ID NO: 5027 - protein, 19 aa, synthetic construct
PLNGPVHLYAQAQTGWVKN

SEQ ID NO: 5028 - protein, 19 aa, synthetic construct
PLNGSVHLYAQAQTGCVKN

SEQ ID NO: 5029 - protein, 19 aa, synthetic construct
PLNGAVHLYAQAQSSSVKN

SEQ ID NO: 5030 - protein, 19 aa, synthetic construct
PLNGAVHLYAQAQTACVKN

SEQ ID NO: 5031 - protein, 19 aa, synthetic construct
PLNGAVHLYAQAQTEWVKN

SEQ ID NO: 5032 - protein, 19 aa, synthetic construct
PLNGAVHLYAQAQTGAVKN

SEQ ID NO: 5033 - protein, 19 aa, synthetic construct
PLNGAVHRSLQAQTGWVKN

SEQ ID NO: 5034 - protein, 19 aa, synthetic construct
PLNGAVHRYAQAQTGWVKN

SEQ ID NO: 5035 - protein, 19 aa, synthetic construct
PLNGAVHVYAQAQTGWVKN

SEQ ID NO: 5036 - protein, 19 aa, synthetic construct
PLNGAVLLYAQAQTGWVKN

SEQ ID NO: 5037 - protein, 19 aa, synthetic construct
PLNGAVNLYAQAQTGCVKN

SEQ ID NO: 5038 - protein, 19 aa, synthetic construct
PLNGAVNLYAQAQTGWVKN

SEQ ID NO: 5039 - protein, 19 aa, synthetic construct
PLNSAVHLYAQAQTGWVKN

SEQ ID NO: 5040 - protein, 19 aa, synthetic construct
PLSGAVHLYAQAQTGWVKN

SEQ ID NO: 5041 - protein, 19 aa, synthetic construct
PPNGAVHLYAQAQTGWVKN

SEQ ID NO: 5042 - protein, 19 aa, synthetic construct
PRNGAVHLYAQAQTGWVKN

SEQ ID NO: 5043 - protein, 19 aa, synthetic construct
PVNGAVHLYAQAQTGWVKN

SEQ ID NO: 5044 - protein, 19 aa, synthetic construct
QLNGAVHIYAQAQTGWVKN

SEQ ID NO: 5045 - protein, 19 aa, synthetic construct
QLNGAVHLYAQAQTGCVKN

SEQ ID NO: 5046 - protein, 19 aa, synthetic construct
QLNGAVHLYAQAQTGLVKN

SEQ ID NO: 5047 - protein, 19 aa, synthetic construct
QLNGAVHLYDQAQTGWVKN

SEQ ID NO: 5048 - protein, 19 aa, synthetic construct
RLNGAVHLYAQAQTGWVKN

SEQ ID NO: 5049 - protein, 19 aa, synthetic construct
SINGAVHLYAQAQTGWVKN

SEQ ID NO: 5050 - protein, 19 aa, synthetic construct
SLNGAVHLYAQAQTGWVKN

SEQ ID NO: 5051 - protein, 19 aa, synthetic construct
SLNGAVNLYAQAQTGWVKN

SEQ ID NO: 5052 - protein, 19 aa, synthetic construct
TLNGAVHLYAQAQTGWVKN

SEQ ID NO: 5053 - protein, 19 aa, synthetic construct
TLNGAVNLYAQAQTGWVKN

SEQ ID NO: 5054 - protein, 19 aa, synthetic construct
PLNGAVHHYAQAQTGWVPN

SEQ ID NO: 5055 - protein, 19 aa, synthetic construct
PLNGAVHLNAQAQTGWVPN

SEQ ID NO: 5056 - protein, 19 aa, synthetic construct
PLNGAVHLSAQAQTGWVPN

SEQ ID NO: 5057 - protein, 19 aa, synthetic construct
PLNGAVHLYAQAQTGCVPN

SEQ ID NO: 5058 - protein, 19 aa, synthetic construct
PLNGAVNLYAQAQTGWVPN

SEQ ID NO: 5059 - protein, 12 aa, synthetic construct
AQAQAQTGWVQN

SEQ ID NO: 5060 - protein, 20 aa, synthetic construct
VATNHQSAQAQAQTGWVQNQ

SEQ ID NO: 5061 - protein, 12 aa, synthetic construct
TNHQSAQAQAQT

SEQ ID NO: 5062 - protein, 7 aa, synthetic construct
AQAQAQT

SEQ ID NO: 5063 - protein, 13 aa, synthetic construct
ATNHQSAQAQAQT

SEQ ID NO: 5064 - protein, 6 aa, synthetic construct
VSAVKN

SEQ ID NO: 5065 - protein, 6 aa, synthetic construct
SQLVQN

SEQ ID NO: 5066 - protein, 6 aa, synthetic construct
LSAVQT

SEQ ID NO: 5067 - protein, 6 aa, synthetic construct
TGSLQN

SEQ ID NO: 5068 - protein, 9 aa, synthetic construct
ALNGAVHLY

SEQ ID NO: 5069 - protein, 9 aa, synthetic construct
  VARIANT 6: note = V, I, L, A, F, D, or G
  VARIANT 7: note = H, N, Q, P, D, L, R, or Y
  VARIANT 8: note = L, H, I, R, or V
PLNGAXXXY

SEQ ID NO: 5070 - protein, 10 aa, synthetic construct
PLNGAVHLYA

SEQ ID NO: 5071 - protein, 10 aa, synthetic construct
AQARDSPKGW

SEQ ID NO: 5072 - protein, 10 aa, synthetic construct
LTNGAVRDRP

SEQ ID NO: 5073 - protein, 10 aa, synthetic construct
VQAFTHDSRG

SEQ ID NO: 5074 - protein, 10 aa, synthetic construct
AQAYSTDVRM

SEQ ID NO: 5075 - protein, 10 aa, synthetic construct
AQAYSTDVRI

SEQ ID NO: 5076 - protein, 10 aa, synthetic construct
AQAFTAAERM

SEQ ID NO: 5077 - protein, 10 aa, synthetic construct
AQTHLQIGVA

SEQ ID NO: 5078 - protein, 10 aa, synthetic construct
AQSNAVLSLA

SEQ ID NO: 5079 - protein, 10 aa, synthetic construct
AQAYSTDERM

SEQ ID NO: 5080 - protein, 10 aa, synthetic construct
AQAYSTDVRL

SEQ ID NO: 5081 - protein, 10 aa, synthetic construct
AQATVSTLRM

SEQ ID NO: 5082 - protein, 10 aa, synthetic construct
AQAYSTDERK

SEQ ID NO: 5083 - protein, 10 aa, synthetic construct
AQAYSTDMRM

SEQ ID NO: 5084 - protein, 10 aa, synthetic construct
VVNGAVLHVA

SEQ ID NO: 5085 - protein, 10 aa, synthetic construct
AQAYSTDVTM

SEQ ID NO: 5086 - protein, 10 aa, synthetic construct
AQAHLQIGVA

SEQ ID NO: 5087 - protein, 10 aa, synthetic construct
FLDPAVSSKA

SEQ ID NO: 5088 - protein, 10 aa, synthetic construct
AQAYVSTLRM

SEQ ID NO: 5089 - protein, 10 aa, synthetic construct
AQAQTGPPLK

SEQ ID NO: 5090 - protein, 10 aa, synthetic construct
EQASRLPTPG

SEQ ID NO: 5091 - protein, 10 aa, synthetic construct
AQASVSTMRM

SEQ ID NO: 5092 - protein, 10 aa, synthetic construct
TDYSAVRLGA

SEQ ID NO: 5093 - protein, 10 aa, synthetic construct
TQAYSTDVRM

SEQ ID NO: 5094 - protein, 10 aa, synthetic construct
AQALPSNERL

SEQ ID NO: 5095 - protein, 10 aa, synthetic construct
AQAYSTDVRT

SEQ ID NO: 5096 - protein, 10 aa, synthetic construct
AQSSLPEMVA

SEQ ID NO: 5097 - protein, 10 aa, synthetic construct
AQAGEQSTRL

SEQ ID NO: 5098 - protein, 10 aa, synthetic construct
AQASNDVGRA

SEQ ID NO: 5099 - protein, 10 aa, synthetic construct
AQATFTASEY

SEQ ID NO: 5100 - protein, 10 aa, synthetic construct
AKAHAGTIYS

SEQ ID NO: 5101 - protein, 10 aa, synthetic construct
AQARTIDQCC

SEQ ID NO: 5102 - protein, 10 aa, synthetic construct
AQEYNSNPKA

SEQ ID NO: 5103 - protein, 10 aa, synthetic construct
AQVVDNSTHA

SEQ ID NO: 5104 - protein, 10 aa, synthetic construct
AQATLSVPLK

SEQ ID NO: 5105 - protein, 10 aa, synthetic construct
AQIVMNSLKA

SEQ ID NO: 5106 - protein, 10 aa, synthetic construct
AQATMSQTMA

SEQ ID NO: 5107 - protein, 10 aa, synthetic construct
AQALTQDERW

SEQ ID NO: 5108 - protein, 10 aa, synthetic construct
AQAQLSTLRP

SEQ ID NO: 5109 - protein, 10 aa, synthetic construct
AQVVMGISVA

SEQ ID NO: 5110 - protein, 10 aa, synthetic construct
AQAYTTDVRM

SEQ ID NO: 5111 - protein, 10 aa, synthetic construct
AQHIDSMRPP

SEQ ID NO: 5112 - protein, 10 aa, synthetic construct
AQASTGTLRL

SEQ ID NO: 5113 - protein, 10 aa, synthetic construct
AQHRALDYYA

SEQ ID NO: 5114 - protein, 10 aa, synthetic construct
AQARESPRGL

SEQ ID NO: 5115 - protein, 10 aa, synthetic construct
AQALLAGTRV

SEQ ID NO: 5116 - protein, 10 aa, synthetic construct
TKIQAVPWNA

SEQ ID NO: 5117 - protein, 10 aa, synthetic construct
AQASLSSTRP

SEQ ID NO: 5118 - protein, 10 aa, synthetic construct
AQAMGSRSDQ

SEQ ID NO: 5119 - protein, 10 aa, synthetic construct
AQAAQGTYRG

SEQ ID NO: 5120 - protein, 10 aa, synthetic construct
SQENAVFSKA

SEQ ID NO: 5121 - protein, 10 aa, synthetic construct
AQAYGLPKGP

SEQ ID NO: 5122 - protein, 10 aa, synthetic construct
GGTLAVVSLA

SEQ ID NO: 5123 - protein, 10 aa, synthetic construct
AQAYVSSVKM

We claim:

1. An isolated, e.g., recombinant, AAV particle comprising an AAV capsid variant and a nucleic acid comprising a transgene encoding a SOD1 targeting polynucleotide wherein
(A) the SOD1 targeting polynucleotide is a single-stranded antisense RNA molecule, a single-stranded siRNA, or a double-stranded RNA (e.g., a siRNA duplex), which comprises an antisense strand comprising a region that is substantially complementary (e.g., at least 70%, 75%, 80%, 85%, 90%, 95%, 99% or 100% complementary) to at least part of an mRNA transcript of a human SOD1 gene (e.g., a human wild-type SOD gene or a human mutated SOD gene), and wherein the SOD1 targeting polynucleotide inhibits expression of the human SOD1 gene; and
(B) the AAV capsid variant comprises an amino sequence comprising the following formula: [N1]-[N2], wherein:
(i) [N1] comprises X1, X2, X3, X4, and X5, wherein:
(a) position X1 is: P, Q, A, H, K, L, R, S, or T;
(b) position X2 is: L, I, V, H, or R;
(c) position X3 is: N, D, I, K, or Y;
(d) position X4 is: G, A, C, R, or S; and
(e) position X5 is: A, S, T, G, C, D, N, Q, V, or Y; and
(ii) [N2] comprises the amino acid sequence of VHLY, VHIY, VHVY, or VHHY; and/or a substitution, e.g., a conservative substitution, of any of the aforesaid amino acids in (i) and/or (ii);
wherein [N1]-[N2] is present from N-terminus to C-terminus, immediately subsequent to position 586, numbered according to any one of SEQ ID NO: 5, 8, 138, or 3636;
optionally, wherein the AAV capsid variant comprises:
(a) an amino acid sequence at least 95% identical to the amino acid sequence of positions 203-743, e.g., a VP3, of any one of SEQ ID NO: 5, 8, or 3636; or
(b) an amino acid sequence at least 95% identical to the amino acid sequence of positions 203-736, e.g., a VP3, of SEQ ID NO: 138.

2. The isolated AAV particle of claim 1, wherein [N1] comprises: PLNGA (SEQ ID NO: 3679), SLNGA (SEQ ID NO: 3702), QLNGA (SEQ ID NO: 3703), ALNGA (SEQ ID NO: 3704), PLNGS (SEQ ID NO: 3705), PVNGA (SEQ ID NO: 3706), PLNGG (SEQ ID NO: 3707), PLNGT (SEQ ID NO: 3708), PLDGA (SEQ ID NO: 3709), QLNGS (SEQ ID NO: 3710), PLNGN (SEQ ID NO: 3711), SLDGA (SEQ ID NO: 3712), HLNGA (SEQ ID NO: 3713), ALNGT (SEQ ID NO: 3714), PINGA (SEQ ID NO: 3715), ALDGA (SEQ ID NO: 3716), PLNCA (SEQ ID NO: 3717), PLNGQ (SEQ ID NO: 3718), PLDSA (SEQ ID NO: 3719), RLDGA (SEQ ID NO: 3720), QLNGN (SEQ ID NO: 3721), PLNGY (SEQ ID NO: 3722), PLDSS (SEQ ID NO: 3723), PLNGC (SEQ ID NO: 3724), PLYGA (SEQ ID NO: 3725), TLNGA (SEQ ID NO: 3726), PVDGA (SEQ ID NO: 3727), PLKGA (SEQ ID NO: 3728), PLNGD (SEQ ID NO: 3729), KLDGA (SEQ ID NO: 3730), PHNGA (SEQ ID NO: 3731), PLNGV (SEQ ID NO: 3732), PLNAA (SEQ ID NO: 3733), QLNGY (SEQ ID NO: 3734), PLDGS (SEQ ID NO: 3735), LLNGA (SEQ ID NO: 3736), PLNRA (SEQ ID NO: 3737), PLIGA (SEQ ID NO: 3738), PRNGA (SEQ ID NO: 3739), or ALNGS (SEQ ID NO: 3740), or a substitution, e.g., a conservative substitution, of any of the aforesaid amino acid sequences.

3. The isolated AAV particle of claim 1 or claim 2 wherein [N1]-[N2] comprises:
(i)
(SEQ ID NO: 3648)
PLNGAVHLY,
(SEQ ID NO: 3795)
ALDGAVHLY,
(SEQ ID NO: 3704)
ALNGAVHLY,
(SEQ ID NO: 3796)
PINGAVHLY,
(SEQ ID NO: 3797)
PLDGAVHLY,
(SEQ ID NO: 3798)
PLDSAVHLY,
(SEQ ID NO: 3799)
PLDSSVHLY,
(SEQ ID NO: 3800)
PLNGGVHLY,
(SEQ ID NO: 3801)
PLNGNVHLY,
(SEQ ID NO: 3802)
PLNGSVHLY,
(SEQ ID NO: 3803)
PLNGTVHLY,
(SEQ ID NO: 3804)
QLNGAVHLY,
(SEQ ID NO: 3805)
SLDGAVHLY,
(SEQ ID NO: 3806)
SLNGAVHLY,
(SEQ ID NO: 3807)
TLNGAVHLY,
(SEQ ID NO: 3808)
PLNGAVHIY,
(SEQ ID NO: 3809)
PLDGAVHVY,
(SEQ ID NO: 3810)
PLNGAVHHY;
(ii) an amino acid sequence comprising any portion of an amino acid sequence in (i), e.g., any 2, 3, 4, 5, 6, 7, or 8 amino acids, e.g., consecutive amino acids, thereof;
(iii) an amino acid sequence comprising at least one, two, or three but no more than four modifications, e.g., substitutions (e.g., conservative substitutions), insertions, or deletions, relative to any of the amino acid sequences in (i); or
(iv) an amino acid sequence comprising at least one, two, or three but no more than four different amino acids, relative to any one of the amino acid sequences in (i).

4. The isolated AAV particle of any one of claims 1-3, wherein the AAV capsid variant further comprises [N3], wherein [N3] comprises X6, X7, X8, and X9, wherein:
(a) position X6 is: A, D, S, or T;
(b) position X7 is: Q, K, H, L, P, or R;
(c) position X8 is: A, P, E, or R; and
(d) position X9 is: Q, H, K, or P; and/or
an amino acid modification, e.g., a conservative substitution, of any of the aforesaid amino acids in (a)-(d).

5. The isolated AAV particle of claim 4, wherein [N3] comprises AQAQ (SEQ ID NO: 3759), SQAQ (SEQ ID NO: 3760), AQPQ (SEQ ID NO: 3761), AQSQ (SEQ ID NO: 3762), AKAQ (SEQ ID NO: 3763), AHAQ (SEQ ID NO: 3764), AQAP (SEQ ID NO: 3765), DQAQ (SEQ ID NO: 3766), APAQ (SEQ ID NO: 3767), AQAK (SEQ ID NO: 3768), AQAH (SEQ ID NO: 3769), AQEQ (SEQ ID NO: 3770), ALAQ (SEQ ID NO: 3771), ARAQ SEQ ID NO: 3772), or TQAQ (SEQ ID NO: 3773), or a substitution, e.g., a conservative substitution, of any of the aforesaid amino acid sequences

6. The isolated AAV particle of any one claims 1-5, wherein the AAV capsid variant further comprises [N4], wherein [N4] comprises X10, X11, and X12, wherein:
(a) position X10 is: L, T, V, R, S, A, C, I, K, M, N, P, or Q;
(b) position X1I is: G, S, A, T, M, V, Q, L, H, I, K, N, P, R, or Y; and
(c) position X12 is: W, S, P, G, A, Q, L, M, K, C, E, F, H, R, T, V, or Y; and/or
an amino acid modification, e.g., a conservative substitution, of any of the aforesaid amino acids in (a)-(c).

7. The isolated AAV particle of claim 6, wherein [N4] is or comprises LSP, TGW, TGL, TGS, TGG, TAW, TGR, TAS, LSS, TSS, SSL, SSS, TLS, TVS, VSS, TSP, VSP, TMS, VAS, TAL, TTS, TLP, VLP, RGW, LSG, LAS, SSP, LLP, STS, TSA, TTP, SAL, LGS, VTP, VSA, IGW, TGF, LTP, TLA, LSA, TVG, TAP, TMP, TSL, VQS, SSM, SLP, VSQ, RSS, TST, VMS, TTA, TQP, LST, LAP, TVA, RLS, TGY, TSG, TAG, VMP, TSQ, TMA, VGS, TSW, TGV, TGT, TLG, LMP, VQP, TGM, SMS, SQL, IGS, RSV, TAA, STP, LSQ, TAQ, TGP, ASP, VSG, SAP, TLQ, LQP, TAT, TGQ, ATS, IGG, VAA, TSM, TVW, TAM, TGA, VAT, QSP, TQA, VQA, RSP, LAT, VAQ, LAA, RST, RTL, LGT, LMS, LGP, RTS, SQP, VLG, SVS, TMQ, SAV, LAG, SGP, TNS, RLT, TTQ, SAA, TSV, RLG, RAS, STQ, CSP, SAG, ALP, VTS, ISP, SVG, LTS, TTT, RSG, TQL, LNP, TVQ, IAS, LAQ, LSR, LSN, TTG, TSN, SMA, TKS, SVA, TQQ, VQQ, RLP, SAM, TAV, TQW, SSR, TQT, VNS, RSA, LMG, RQS, LVG, VTA, RTT, SMG, VMA, TKP, SAQ, NSP, ATP, VAG, RGS, VKP, RMS, NLP, NAL, RTP, RQL, VQG, VTG, VST, NAS, RVE, ATG, AMS, RNS, VMQ, SMQ, LQQ, TMG, LGQ, TSH, AAP, RSQ, TYS, ITP, VAK, TQM, TKA, SQQ, ISG, VSR, RTA, RML, SQM, VAN, CTP, ISS, AGP, TAK, RTG, LHP, TMT, AQP, QAP, RQP, LKS, NTT, TSK, RYS, KSS, NTP, VGG, IAA, LMA, MAP, VHP, VLS, LAN, ATQ, TNA, TAN, VSN, AAA, AVG, LTA, SAN, RAG, RQG, TLR, LSH, SAF, RAA, IQP, ILG, VNG, SVQ, LSK, TNG, RTQ, TMN, RGG, TTR, VRP, VKA, LAR, NQP, TMK, TYA, TQK, TTK, IAG, TQN, LAH, NTQ, RQQ, RAQ, TKQ, TQH, TNQ, LMQ, VNA, VQT, TQR, VGK, VKQ, IQS, LQR, TMM, VGN, RIG, SAK, RIA, VQN, NVQ, RIP, NAQ, NMQ, TPS, LTN, VTK, PGW, LPP, SPP, TPA, TGC, VPP, TPT, TPW, TPP, RPP, TPQ, TPR, TPG, VPA, VPQ, RPG, KGW, TRW, TAR, IPP, RSL, LVP, KGS, VAP, KGG, KAW, PGS, TRL, or AGW, or a substitution, e.g., a conservative substitution, of any of the aforesaid amino acid sequences;
(ii) LSP; or
(iii) TGW.

8. The AAV particle of any one of claims 1-7, wherein the AAV capsid variant further comprises [N5], wherein [N5] comprises X13, X14, and X15, wherein:
(a) position X13 is: V, D, F, G, L, A, E, or I;
(b) position X14 is: Q, K, R, H, E, L, or P; and
(c) position X15 is: N, T, K, H, D, Y, S, I, or P; and/or
an amino acid modification, e.g., a conservative substitution, of any of the aforesaid amino acids in (a)-(c).

9. The AAV particle of claim 8, wherein [N5] is or comprises VQN, VKN, VQT, VQK, DQN, VQH, GQN, VQI, VHN, FQN, LQN, VLN, VRN, VQS, VQY, AQN, VEN, VQD, VPN, IQN, VKK, DKN, VKT, VQP, EQN, GQT, FQK, GHN, or VPH, or a substitution, e.g., a conservative substitution, of any of the aforesaid amino acid sequences;
(ii) VKN, VPN, VEN, or VHN; or
(iii) VQN.

10. The isolated AAV particle of claim 8 or 9, wherein [N1]-[N2]-[N3]-[N4]-[N5] comprises:
(i) the amino acid sequence of any of SEQ ID NOs: 139-1138;
(ii) the amino acid sequence of PLNGAVHLYAQAQLSPVKN (SEQ ID NO: 566);
(iii) the amino acid sequence of PLNGAVHLYAQAQTGWVPN (SEQ ID NO: 314);
(iv) the amino acid sequence of PLNGAVHLY (SEQ ID NO: 3648);
(v) the amino acid sequence of any of SEQ ID NOs: 14-17, 40-136, 314, 325, 491, 499, 529, 558, 566, 576, 603, 610, 625, 631, 648, 649, 700, 703, 720, 755, 763, 765, 771, 791, 804, 816, 818, 819, 828, 859, 864, 871, 885, 946, 960, 966, 978, 979, 1016, 1033, 1032, 1037, 1058, 1081, 1100, 1122, or 1174-1193;
(v) an amino acid sequence comprising any portion of an amino acid sequence in (i)-(v), e.g., any 2, 3, 4, 5, 6, 7, 8, 9, 10, 11, 12, 13, 14, 15, 16, 17, or 18 amino acids, e.g., consecutive amino acids, thereof;
(vi) an amino acid sequence comprising at least one, two, or three but no more than four substitutions (e.g., conservative substitutions), insertions, or deletions, relative to any of the amino acid sequences in (i)-(v); or
(vii) an amino acid sequence comprising at least one, two, or three but no more than four different amino acids, relative to any one of the amino acid sequences in (i)-(v).

11. The isolated AAV particle of any one of claims 8-10, wherein the AAV capsid variant comprises from N-terminus to C-terminus [N1]-[N2]-[N3]-[N4]-[N5], wherein:
(i) [N1] is present immediately subsequent to position 586, and replaces positions 587 and 588 (e.g., A587 and Q588), numbered according to SEQ ID NO: 138;
(ii) [N2] is present immediately subsequent to [N1];
(iii) [N3] is present immediately subsequent to position 588, and replaces positions 589-592 (e.g., A589, Q590, A591, Q592), numbered according to the amino acid sequence of SEQ ID NO: 138;
(iv) [N4] is present immediately subsequent to position 592, and replaces positions 593-595 (e.g., T593, G594, W595), numbered according to the amino acid sequence of SEQ ID NO: 138;
(v) [N5] is present immediately subsequent to position 595, and replaces positions 596-598 (e.g., V596, Q597, N598), numbered according to the amino acid sequence of SEQ ID NO: 138; and/or
(vi) [N1]-[N2]-[N3]-[N4]-[N5] is present immediately subsequent to position 586 and replaces positions 587-598 (e.g., A587, Q588, A589, Q590, A591, Q592, T593, G594, W595, V596, Q597, N598), numbered according to SEQ ID NO: 138.

12. The isolated AAV particle of any one of claims 8-11, wherein:
(i) the AAV capsid variant comprises an amino acid other than A at position 587 and/or an amino acid other than Q at position 588, numbered according to SEQ ID NO: 138;
(ii) [N1] corresponds to positions 587-591 of SEQ ID NO: 5, 8, or 3636;
(iii) [N2] corresponds to positions 592 to 595 of SEQ ID NO: 5, 8, or 3636;
(iv) [N3] corresponds to positions 596-599 of SEQ ID NO: 5, 8, or 3636;
(v) [N4] corresponds to positions 600-602 of SEQ ID NO: 5, 8, or 3636;
(vi) [N5] corresponds to positions 603-605 of SEQ ID NO: 5, 8, or 3636; and/or
(vii) [N1]-[N2]-[N3]-[N4]-[N5] corresponds to positions 587-605 of SEQ ID NO: 5, 8, or 3636.

13. An isolated, e.g., recombinant, AAV particle comprising an AAV capsid variant and a nucleic acid comprising a transgene encoding a SOD1 targeting polynucleotide (e.g., a SOD1 targeting RNAi), wherein,
(A) the SOD1 targeting polynucleotide is a single-stranded antisense RNA molecule, a single-stranded siRNA, or a double-stranded RNA (e.g., a siRNA duplex), which comprises an antisense strand comprising a region that is substantially complementary (e.g., at least 70%, 75%, 80%, 85%, 90%, 95%, 99% or 100% complementary) to at least part of an mRNA transcript of a human SOD1 gene (e.g., a human wild-type SOD gene or a human mutated SOD gene), and wherein the SOD1 targeting polynucleotide inhibits expression of the human SOD1 gene; and
(B) the AAV capsid variant comprises [A][B], wherein [A] comprises the amino acid sequence of PLNGA (SEQ ID NO: 3679), and [B] comprises X1, X2, X3, X4, wherein:
(i) X1 is: V, I, L, A, F, D, or G;
(ii) X2 is: H, N, Q, P, D, L, R, or Y;
(iii) X3 is: L, H, I, R, or V; and
(iv) X4 is Y; and/or
wherein the AAV capsid variant comprises an amino acid modification, e.g., a conservative substitution, of any of the aforesaid amino acids in (i)-(iv);
wherein [A][B] is present from N-terminus to C-terminus, immediately subsequent to position 586, numbered according to any one of SEQ ID NO: 5, 8, 138, or 3636;
optionally wherein the AAV capsid variant comprises:
(a) an amino acid sequence at least 95% identical to the amino acid sequence of positions 203-743, e.g., a VP3, of any one of SEQ ID NO: 5, 8, or 3636; or
(b) an amino acid sequence at least 95% identical to the amino acid sequence of positions 203-736, e.g., a VP3, of SEQ ID NO: 138.

14. The isolated AAV particle of claim 13, wherein [B] is or comprises:
(i) VHLY (SEQ ID NO: 3741), VHHY (SEQ ID NO: 3747), VHIY (SEQ ID NO: 3746), VNLY (SEQ ID NO: 3744), VQLY (SEQ ID NO: 3751), IHLY(SEQ ID NO: 3752), LHLY (SEQ ID NO: 3749), VPLY(SEQ ID NO: 3743), VDLY (SEQ ID NO: 3753), AHLY (SEQ ID NO: 3754), VHRY (SEQ ID NO: 3745), FHLY (SEQ ID NO: 3748), DHLY (SEQ ID NO: 3750), VLLY (SEQ ID NO: 3755), GHLY (SEQ ID NO: 3756), VRLY (SEQ ID NO: 3757), VHVY (SEQ ID NO: 3742), or VYLY (SEQ ID NO: 3758) or a substitution, e.g., a conservative substitution, of any of the aforesaid amino acid sequences; or
(ii) VHLY (SEQ ID NO: 3741).

15. The isolated AAV particle of claim 13 or claim 14, wherein [A][B] comprises:
(i) PLNGAVH (SEQ ID NO: 3681), PLNGAVN (SEQ ID NO: 1254), PLNGAVQ (SEQ ID NO: 1255), PLNGAIH (SEQ ID NO: 1256), PLNGALH (SEQ ID NO: 1257), PLNGAVP (SEQ ID NO: 1258), PLNGAVD (SEQ ID NO: 1259), PLNGAAH (SEQ ID NO: 1260), PLNGAFH (SEQ ID NO: 1261), PLNGADH (SEQ ID NO: 1263), PLNGAVL (SEQ ID NO: 1264), PLNGAGH (SEQ ID NO: 1265), PLNGAVR (SEQ ID NO: 1266), or PLNGAVY (SEQ ID NO: 1267); or
(ii) PLNGAVH (SEQ ID NO: 3681);
(iii) amino acid sequence comprising any portion of an amino acid sequence in (i) or (ii), e.g., any 2, 3, 4, 5, or 6 amino acids, e.g., consecutive amino acids, thereof;
(iv) an amino acid sequence comprising at least one, two, or three but no more than four modifications, e.g., substitutions (e.g., conservative substitutions), insertions, or deletions, relative to any of the amino acid sequences in (i) or (ii); or
(v) an amino acid sequence comprising at least one, two, or three but no more than four different amino acids, relative to any one of the amino acid sequences in (i) or (ii).

16. The isolated AAV particle of any one of claims 13-15, wherein the AAV capsid variant further comprises [C], wherein [C] comprises X4, X5, X6, and X7, wherein:
(a) position X4 is: A, D, S, or T;
(b) position X5 is: Q, K, H, L, P, or R;
(c) position X6 is: A, P, or E; and
(d) position X7 is: Q, H, K, or P; and/or
an amino acid modification, e.g., a conservative substitution, of any of the aforesaid amino acids in (a)-(d).

17. The isolated AAV particle of claim 16, wherein [C] is or comprises:
(i) AQAQ (SEQ ID NO: 3759), AQPQ (SEQ ID NO: 3761), AKAQ (SEQ ID NO: 3763), DQAQ (SEQ ID NO: 3766), SQAQ (SEQ ID NO: 3760), AHAQ (SEQ ID NO: 3764), AQEQ (SEQ ID NO: 3770), AQAK (SEQ ID NO: 3768), ALAQ (SEQ ID NO: 3771), APAQ (SEQ ID NO: 3767), ARAQ SEQ ID NO: 3772), AQAH (SEQ ID NO: 3769), AQAP (SEQ ID NO: 3765), or TQAQ (SEQ ID NO: 3773), or a substitution, e.g., a conservative substitution, of any of the aforesaid amino acid sequences; or
(ii) AQAQ (SEQ ID NO: 3759).

18. The isolated AAV particle of any one of claims 1-17, wherein the AAV capsid variant further comprises:
(i) the amino acid L at position 593 numbered according to SEQ ID NO: 138 or at position 600 numbered according to SEQ ID NO: 5, 8, or 3636; the amino acid S at position 594 numbered according to SEQ ID NO: 138, or at position 601 numbered according to SEQ ID NO: 5, 8, or 3636; and the amino acid P at position 595 numbered according to SEQ ID NO: 138 or at position 602 numbered according to SEQ ID NO: 5, 8, or 3636; or
(ii) the amino acid T at position 593 numbered according to SEQ ID NO: 138 or at position 600 numbered according to SEQ ID NO: 5, 8, or 3636; the amino acid G at position 594 numbered according to SEQ ID NO: 138, or at position 601 numbered according to SEQ ID NO: 5, 8, or 3636; and the amino acid W at position 595 numbered according to SEQ ID NO: 138 or at position 602 numbered according to SEQ ID NO: 5, 8, or 3636.

19. The isolated AAV particle of any one of claims 13-18, wherein the AAV capsid variant further comprises [D], wherein [D] comprises X8, X9, and X10, wherein:
(a) position X8 is: L, T, V, S, R, I, A, N, C, Q, M, P, or K;
(b) position X9 is: S, G, T, M, A, G, K, Q, V, I, R, N, P, L, H, or Y; and
(c) position X10 is: P, W, K, Q, S, C, A, G, N, T, R, V, M, H, L, E, F, or Y; or a substitution, e.g., a conservative substitution, of any of the aforesaid amino acids in (a)-(c).

20. The isolated AAV particle of any one of claims 13-19, wherein [D] is or comprises:
(i) LSP, TGW, TTK, TMK, VAQ, TAW, TGS, VKQ, SAP, LSK, LAP, LAQ, TAK, SAK, TGC, TQK, TVA, TTQ, TAQ, RIA, RAS, TTP, LTP, STP, TSP, TMQ, TSK, VSQ, VSP, TVQ, VTA, RQP, ISG, VRP, LGP, TNQ, VQQ, VAN, AAP, RST, TMA, IQP, IAS, TVS, RGS, NSP, LQP, VTG, VMQ, SMA, VGK, IQS, CSP, LQR, TPP, VTK, SSP, AGP, LAR, TTT, TGG, TLQ, TMS, VAK, RAA, TVG, LNP, LSQ, TKP, TNA, LAT, VTP, VQA, TTS, CTP, TAG, TSQ, TMN, TST, VKP, ASP, VAA, LKS, IAA, TAA, TKA, VSN, TAP, LMP, LHP, RAQ, LTN, RTT, TSV, RMS, VGN, LMQ, TAT, VHP, ISS, VAS, TRW, TMT, RSS, RTG, VAT, VTS, VSS, TNS, VKA, SGP, TGP, TAM, TQP, TQQ, VSR, VSA, VLS, TQH, LAS, QAP, NAQ, ATP, VQP, TTA, LAA, RSG, LMA, TMP, LAN, VST, SAQ, NTP, TGL, TAV, RLG, RTL, TQM, ITP, TVW, RSA, TAS, TMG, VQS, ISP, VGG, TAL, LAG, RTA, RSP, TLA, LAH, TSL, RLS, LMG, SMQ, TQT, VGS, VSG, VMA, IGG, IAG, TGR, LSH, VQT, RNS, TLP, TKQ, LGQ, NMQ, NVQ, RGG, VMS, TTG, LSR, MAP, ILG, TGT, TSS, TSH, RIG, SAM, TSM, SMG, SMS, TSG, TGA, VNS, VAG, IGS, LGS, VNG, LTA, VQN, TKS, SVG, NAS, TSA, TAN, LTS, RSQ, RIP, RVE, VLP, SVA, LQQ, LST, SAA, RTS, TQN, VNA, LMS, TMM, RSV, TQL, RTP, RQQ, VQG, PGW, STQ, QSP, RYS, TQR, SAG, RQS, SQP, STS, VLG, NQP, LGT, RAG, TGM, LSN, RLP, RQG, RLT, TLR, SAF, SVQ, LLP, RTQ, LPP, AQP, TPQ, TSW, NTT, TTR, TQW, NTQ, TYA, TLS, NLP, ATS, ATQ, LSS, TQA, VMP, NAL, RML, RQL, TLG, TGF, SAL, SQL, LSA, TGQ, TNG, AAA, SAV, LSG, SSR, SPP, LVG, TPA, KGW, VPP, ATG, SAN, SQQ, SSM, AVG, VAP, TPS, RGW, SSL, TYS, TPT, IGW, KSS, TGY, RSL, SVS, TSN, SQM, VPA, AMS, TPG, TGV, VPQ, SLP, ALP, TPW, TPR, SSS, RPP, IPP, AGW, or RPG, or a substitution, e.g., a conservative substitution, of any of the aforesaid amino acid sequences;
(ii) LSP; or
(iii) TGW.

21. The isolated AAV particle of any one of claims 1-20, wherein the AAV capsid variant further comprises:
(i) the amino acid V at position 596 numbered according to SEQ ID NO: 138 or at position 603 numbered according to SEQ ID NO: 5, 8, or 3636; the amino acid K, P, E or H at position 597 numbered according to SEQ ID NO: 138 or at position 604 numbered according to SEQ ID NO: 5, 8, or 3636; and the amino acid N at position 598 numbered according to the amino acid sequence of SEQ ID NO: 138 or at position 605 numbered according to SEQ ID NO: 5, 8, or 3636;
(ii) the amino acid V at position 596 numbered according to SEQ ID NO: 138 or at position 603 numbered according to SEQ ID NO: 5, 8, or 3636; the amino acid K at position 597 numbered according to SEQ ID NO: 138 or at position 604 numbered according to SEQ ID NO: 5, 8, or 3636; and the amino acid N at position 598 numbered according to the amino acid sequence of SEQ ID NO: 138 or at position 605 numbered according to SEQ ID NO: 5, 8, or 3636;
(iii) the amino acid V at position 596 numbered according to SEQ ID NO: 138 or at position 603 numbered according to SEQ ID NO: 5, 8, or 3636; the amino acid P at position 597 numbered according to SEQ ID NO: 138 or at position 604 numbered according to SEQ ID NO: 5, 8, or 3636; and the amino acid N at position 598 numbered according to the amino acid sequence of SEQ ID NO: 138 or at position 605 numbered according to SEQ ID NO: 5, 8, or 3636; or
(iv) the amino acid V at position 596 numbered according to SEQ ID NO: 138 or at position 603 numbered according to SEQ ID NO: 5, 8, or 3636; the amino acid Q at position 597 numbered according to SEQ ID NO: 138 or at position 604 numbered according to SEQ ID NO: 5, 8, or 3636; and the amino acid N at position 598 numbered according to the amino acid sequence of SEQ ID NO: 138 or at position 605 numbered according to SEQ ID NO: 5, 8, or 3636.

22. The isolated AAV particle of any one of claims 13-21, wherein the AAV capsid variant further comprises [E], wherein [E] comprises X11, X12, and X13, wherein:
(a) position X1I is: V, D, F, A, E, L, G, or I;
(b) position X12 is: Q, R, P, K, L, H, or E; and
(c) position X13 is: N, H, S, T, P, K, I, D, or Y; or a substitution, e.g., a conservative substitution, of any of the aforesaid amino acids in (a)-(c).

23. The isolated AAV particle of claim 22, wherein [E] comprises:
(i) VQN, DQN, VQH, FQN, VQS, VQT, VQP, VRN, VPN, VKN, AQN, VQK, EQN, VQI, LQN, GQT, VLN, VQD, VHN, GQN, VKT, VKK, FQK, VEN, VQY, DKN, GHN, IQN, or VPH, or a substitution, e.g., a conservative substitution, of any of the aforesaid amino acid sequences; or
(ii) VKN, VPN, or VQN.

24. The isolated AAV particle of claim 22 or 23, wherein [A][B][C][D][E] comprises:
(i) the amino acid sequence of any of SEQ ID NOs: 143, 148, 149, 151, 153, 154-158, 160-163, 166, 168, 170, 171, 173-175, 177-179, 181, 182, 184-188, 191-197, 199-210, 212-215, 217-225, 227-231, 233, 234, 236-240, 243-262, 265, 267, 268, 270-277, 279, 282, 284-286, 288-293, 295, 296, 298, 300-314, 316-327, 329, 331, 332, 334, 336, 337-344, 346-350, 352-354, 356-365, 367, 369, 371-380, 382-385, 387, 392-394, 396, 397, 399-401, 404-411, 413-415, 417, 419-429, 432, 433, 435-437, 438, 440-442, 444-447, 450-454, 456, 458-461, 464, 465, 467-469, 471-484, 487-495, 497, 498, 500-503, 505, 507-512, 514-517, 522-525, 528-539, 542-545, 547, 551-555, 558-561, 563-568, 570, 573, 574, 576, 579, 581, 582, 584, 586, 587, 591-596, 598, 601, 604, 605, 606, 607, 610, 612, 614-619, 624-629, 631-636, 640, 641, 645, 646, 649, 650, 656, 658, 661, 663, 664, 666, 668, 669, 670, 672, 673, 674, 675, 677, 679, 683, 684, 686, 688, 689, 691, 693, 695, 696, 697, 699, 700, 701, 702, 704-706, 709-714, 720, 722, 725-731, 733, 736, 740, 745, 749-752, 754, 755, 757, 758, 760-765, 767, 768, 770, 771, 773, 778-780, 783-788, 792-794, 797-799, 801, 802, 804-806, 812, 814, 815, 817, 818, 820, 821, 824, 828, 831, 832, 834-837, 839, 840-845, 847, 848, 850-855, 857-859, 861, 862, 865, 866, 869-872, 874-876, 882-884, 887, 889-895, 897, 899, 901, 903-905, 907, 908, 910, 911, 913, 915, 919, 920, 923, 924, 926, 927, 929, 931-933, 935, 937, 939-949, 952-955, 957, 958, 960, 962, 964, 965, 967, 971, 973, 974, 976, 977, 981, 985-989, 992, 994, 997-1000, 1002, 1004, 1006-1008, 1010, 1013, 1015, 1017, 1018, 1020, 1021, 1023-1025, 1027, 1029-1031, 1033-1035, 1037-1040, 1043, 1046, 1049, 1052, 1053, 1056, 1057, 1059, 1062, 1064, 1065, 1067, 1068, 1070, 1073, 1075, 1077-1080, 1083-1087, 1089, 1090, 1093, 1094, 1097, 1100, 1101, 1103, 1105-1107, 1110-1112, 1114-1117, 1119, 1121, 1125, 1126, 1129, 1132, 1133, 1135;
(ii)
(SEQ ID NO: 566)
PLNGAVHLYAQAQLSPVKN;
(iii)
(SEQ ID NO: 314)
PLNGAVHLYAQAQTGWVPN;
(iv)
(SEQ ID NO: 3648)
PLNGAVHLY;
(v) an amino acid sequence comprising any portion of an amino acid sequence in (i)-(iv), e.g., any 2, 3, 4, 5, 6, 7, 8, 9, 10, 11, 12, 13, 14, 15, 16, 17, or 18 amino acids, e.g., consecutive amino acids, thereof;
(vi) an amino acid sequence comprising at least one, two, or three but no more than four substitutions (e.g., conservative substitutions), insertions, or deletions, relative to any of the amino acid sequences in (i)-(iv); or
(vii) an amino acid sequence comprising at least one, two, or three but no more than four different amino acids, relative to any one of the amino acid sequences in (i)-(iv).

25. The isolated AAV particle of any one of claims 22-24, which comprises from N-terminus to C-terminus [A][B][C][D][E], wherein:
(i) [A] is present immediately subsequent to position 586, and replaces positions 587 and 588 (e.g., A587 and Q588), numbered according to SEQ ID NO: 138;
(ii) [B] is present immediately subsequent to [A];
(iii) [C] is present immediately subsequent to position 588, and replaces positions 589-592 (e.g., A589, Q590, A591, Q592), numbered according to the amino acid sequence of SEQ ID NO: 138;
(iv) [D] is present immediately subsequent to position 592, and replaces positions 593-595 (e.g., T593, G594, W595), numbered according to the amino acid sequence of SEQ ID NO: 138;
(v) [E] is present immediately subsequent to position 595, and replaces positions 596-598 (e.g., V596, Q597, N598), numbered according to the amino acid sequence of SEQ ID NO: 138; and/or
(vi) [A][B][C][D][E] is present immediately subsequent to position 586 and replaces positions 587-598 (e.g., A587, Q588, A589, Q590, A591, Q592, T593, G594, W595, V596, Q597, N598), numbered according to SEQ ID NO: 138.

26. The isolated AAV particle of any one of claims 22-25, wherein:
(i) the AAV capsid variant comprises an amino acid other than A at position 587 and/or an amino acid other than Q at position 588, numbered according to SEQ ID NO: 138;
(ii) [A] corresponds to positions 587-591 of SEQ ID NO: 5, 8, or 3636;
(iii) [B] corresponds to positions 592 to 595 of SEQ ID NO: 5, 8, or 3636;
(iv) [C] corresponds to positions 596-599 of SEQ ID NO: 5, 8, or 3636;
(v) [D] corresponds to positions 600-602 of SEQ ID NO: 5, 8, or 3636;
(vi) [E] corresponds to positions 603-605 of SEQ ID NO: 5, 8, or 3636; and/or
(vii) [A][B][C][D][E] corresponds to positions 587-605 of SEQ ID NO: 5, 8, or 3636.

27. The isolated AAV particle of any one of claims 1-26, which comprises:
(i) the amino acid sequence corresponding to positions 203-743, e.g., a VP3, of any one of SEQ ID NOs: 5, 8, or 3636, or a sequence with at least 90%, 95%, 96%, 97%, 98%, or 99% sequence identity thereto
(ii) the amino acid sequence corresponding to positions 138-743, e.g., a VP2, of any one of SEQ ID NOs: 5, 8, or 3636, or a sequence with at least 90%, 95%, 96%, 97%, 98%, or 99% sequence identity thereto;
(iii) the amino acid sequence of any one of SEQ ID NOs: 5, 8, or 3636 (e.g., a VP1), or an amino acid sequence with at least 90%, 95%, 96%, 97%, 98%, or 99% sequence identity thereto;
(iv) an amino acid sequence comprising at least one, two or three modifications, e.g., substitutions (e.g., conservative substitutions), but not more than 30, 20 or 10 modifications, e.g., substitutions (e.g., conservative substitutions), relative to the amino acid sequence of any one of SEQ ID NO: 5, 8, or 3636; and/or
(v) an amino acid sequence comprising at least one, two or three, but not more than 30, 20 or 10 different amino acids, relative to the amino acid sequence of any one of SEQ ID NO: 5, 8, or 3636.

28. An isolated, e.g., recombinant, AAV particle comprising an AAV capsid variant and a nucleic acid comprising a transgene encoding encoding a SOD1 targeting polynucleotide wherein.
(A) the SOD1 targeting polynucleotide is a single-stranded antisense RNA molecule, a single-stranded siRNA, or a double-stranded RNA (e.g., a siRNA duplex), which comprises an antisense strand comprising a region that is substantially complementary (e.g., at least 70%, 75%, 80%, 85%, 90%, 95%, 99% or 100% complementary) to at least part of an mRNA transcript of a human SOD1 gene (e.g., a human wild-type SOD gene or a human mutated SOD gene), and wherein the SOD1 targeting polynucleotide inhibits expression of the human SOD1 gene; and
(B) the AAV capsid variant comprises:
(i) the amino acid sequence of PLNGAVHLY (SEQ ID NO: 3648);
(ii) an amino acid sequence comprising at least 5, 6, 7, 8, or 9 consecutive amino acids from the amino acid sequence of PLNGAVHLY (SEQ ID NO: 3648);
(iii) an amino acid sequence comprising at least one, two, or three but no more than four substitutions (e.g., conservative substitutions), relative to the amino acid sequence of PLNGAVHLY (SEQ ID NO: 3648); or
(iv) an amino acid sequence comprising at least one, two, or three but no more than four different amino acids relative to the amino acid sequence of PLNGAVHLY (SEQ ID NO: 3648)
wherein the amino acid sequence of (i)-(iv) is present immediately subsequent to position 586, numbered according to any one of SEQ ID NOs: 5, 8, 138, or 3636;
optionally wherein the AAV capsid variant further comprises:
(a) a VP1 protein comprising the amino acid sequence of SEQ ID NO: 5, 8, 3636;
(b) a VP2 protein comprising the amino acid sequence of positions 138-743 of SEQ ID NO: 5, 8, or 3636;
(c) a VP3 protein comprising the amino acid sequence of positions 203-743 of SEQ ID NO: 5, 8, or 3636; or
(d) an amino acid sequence at least 90% (e.g., at least 92%, 95%, 96%, 97%, 98%, or 99%) identical to any one the amino acid sequences of (a)-(b).

29. The AAV particle of any one of claims 1-28, wherein the SOD1 targeting polynucleotide is a siRNA duplex comprising a sense strand and an antisense strand, wherein the siRNA duplex ranges from 9 to 36 nucleotides in length (e.g., from 15 to 30 nucleotides in length, from 15 to 25 nucleotides in length, from 17 to 22 nucleotides, or from 17-20 nucleotides in length).

30. The AAV particle of claim claim 28 or claim 29, wherein the siRNA duplex comprises:
(i) a sense strand nucleotide sequence comprising at least 15 (e.g., at least 16, 17, 18, 19, 20, 21, 22, or 23) contiguous nucleotides differing by no more than 3 (e.g., by no more than 0, 1 or 2) nucleotides from a sense strand nucleotide sequence comprising any one of SEQ ID NOs: 2004-2172, 2342-2351, 2353-2356, 2358, 2360, 2362, 2364, 2366, 2367, 2370-2380, 2385, 2387, 2389-2394, 2522-2526 and 2528-2534, or a nucleotide sequence at least 80%, 81%, 82%, 83%, 84%, 85%, 86%, 87%, 88%, 89%, 90%, 91%, 92%, 93%, 94%, 95%, 96%, 97%, 98% or 99% identical to any of the aforesaid nucleotide sequences; and
(ii) an antisense strand sequence comprising at least 15 (e.g., at least 16, 17, 18, 19, 20, 21, 22, or 23) contiguous nucleotides differing by no more than 3 (e.g., by no more than 0, 1 or 2) nucleotides from an antisense sequence comprising any one of SEQ ID NOs: 2173-2341, 2352, 2353, 2357, 2359, 2361, 2363, 2365, 2368, 2384, 2386, 2388, 2395, 2396, 2505-2508, 2510 or 2511, or a nucleotide sequence at least 80%, 81%, 82%, 83%, 84%, 85%, 86%, 87%, 88%, 89%, 90%, 91%, 92%, 93%, 94%, 95%, 96%, 97%, 98% or 99% identical to any of the aforesaid nucleotide sequences.

31. The AAV particle of any one of claims 28-30, wherein the siRNA duplex is selected from:
(i) siRNA duplex ID numbers D-2741 to D2985, and D-4009 to D-4021, or a siRNA duplex at least 80%, 81%, 82%, 83%, 84%, 85%, 86%, 87%, 88%, 89%, 90%, 91%, 92%, 93%, 94%, 95%, 96%, 97%, 98% or 99% identical to any of the aforesaid siRNA duplexes;
(ii) siRNA duplex numbers D-2968, D-2959, or D-4012, or a siRNA duplex at least 80%, 81%, 82%, 83%, 84%, 85%, 86%, 87%, 88%, 89%, 90%, 91%, 92%, 93%, 94%, 95%, 96%, 97%, 98% or 99%, identical to siRNA duplex ID numbers D-2968, D-2959, or D-4012.

32. The AAV particle of any one of claims 28-31, wherein the siRNA duplex comprises:
(i) a sense strand sequence comprising at least 15 (e.g., at least 16, 17, 18, 19, 20, 21, 22, or 23) contiguous nucleotides differing by no more than 3 (e.g., by no more than 0, 1 or 2) nucleotides from SEQ ID NO: 2525, 2376, or 2381; and
(ii) an antisense strand sequence comprising at least 15 (e.g., at least 16, 17, 18, 19, 20, 21, 22, or 23) contiguous nucleotides differing by no more than 3 (e.g., by no more than 0, 1 or 2) nucleotides from SEQ ID NO: 2507, 2365, or 2363;
(iii) a sense strand sequence comprising SEQ ID NO: 2525, or a nucleotide differing by no more than 3 (e.g., by no more than 0, 1 or 2) nucleotides from SEQ ID NO: 2525, and an antisense strand sequence comprising SEQ ID NO: 2507, or a nucleotide differing by no more than 3 (e.g., by no more than 0, 1 or 2) nucleotides from SEQ ID NO: 2507;
(iv) a sense strand sequence comprising SEQ ID NO: 2376, or a nucleotide differing by no more than 3 (e.g., by no more than 0, 1 or 2) nucleotides from SEQ ID NO: 2376, and an antisense strand sequence comprising SEQ ID NO: 2365, or a nucleotide differing by no more than 3 (e.g., by no more than 0, 1 or 2) nucleotides from SEQ ID NO: 2365; and/or
(v) a sense strand sequence comprising SEQ ID NO: 2381, or a nucleotide differing by no more than 3 (e.g., by no more than 0, 1 or 2) nucleotides from SEQ ID NO: 2381, and an antisense strand sequence comprising SEQ ID NO: 2363, or a nucleotide differing by no more than 3 (e.g., by no more than 0, 1 or 2) nucleotides from SEQ ID NO: 2363.

33. The AAV particle of claim 32, wherein the siRNA duplex comprises:
(i) a sense strand sequence comprising SEQ ID NO: 2525, and an antisense strand sequence comprising SEQ ID NO: 2507;
(ii) a sense strand sequence comprising SEQ ID NO: 2376, and an antisense strand sequence comprising SEQ ID NO: 2365; and/or
(iii) a sense strand sequence comprising SEQ ID NO: 2381, and an antisense strand sequence comprising SEQ ID NO: 2363.

34. The AAV particle of any one of claims 28-33, wherein at least one of the sense strand sequence and the antisense strand sequence comprise a 3′ overhang of at least 1, or 2 nucleotides.

35. The AAV particle of any one of claims 28-34, wherein the siRNA duplex is encoded by a modulatory polynucleotide comprising:
(i) a 5′ flanking region;
(ii) a loop region; and/or
(iii) a 3′ flanking region.

36. The AAV particle of claim 35, wherein the modulatory polynucleotide comprises:
(i) a 5′ flanking region comprising a nucleotide sequence of SEQ ID NO: 2547, 2548, 2549, or 5014, or a nucleotide sequence substantially identical (e.g., having at least 70%, 75%, 80%, 85%, 90%, 92%, 95%, 97%, 98%, or 99% sequence identity) thereto; or a nucleotide sequence having at least one, two, three, four, five, six, or seven modifications, but no more than ten modifications of SEQ ID NO: 2547, 2548, 2549, or 5014;
(ii) a loop region comprising a nucleotide sequence of SEQ ID NO: 2550, 2551, 2552, or 2553, or a nucleotide sequence substantially identical (e.g., having at least 70%, 75%, 80%, 85%, 90%, 92%, 95%, 97%, 98%, or 99% sequence identity) thereto; or a nucleotide sequence having at least one, two, three, or four, modifications, but no more than six modifications of SEQ ID NO: 2550, 2551, 2552, or 2553; and/or
(iii) a 3′ flanking region comprising a nucleotide sequence of SEQ ID NO: 2554, 2555, 2556, 2557, or 2558, or a nucleotide sequence substantially identical (e.g., having at least 70%, 75%, 80%, 85%, 90%, 92%, 95%, 97%, 98%, or 99% sequence identity) thereto; or a nucleotide sequence having at least one, two, three, four, five, six, or seven modifications, but no more than ten modifications of SEQ ID NO: 2554, 2555, 2556, 2557, or 2558.

37. The AAV particle of claim 28-36, wherein the modulatory polynucleotide comprises:
(i) the 5′ flanking region comprises a nucleotide sequence of SEQ ID NO: 2547;
(ii) the loop region comprises a nucleotide sequence of SEQ ID NO: 2550; and/or
(iii) 3′ flanking region comprises a nucleotide sequence of SEQ ID NO: 2554.

38. The AAV particle of any one of claims 28-35, wherein the siRNA duplex is encoded by
(i) a nucleotide sequence of any one of SEQ ID NOs: 2562, 2579, 5022, 2559, 2560, 2561, 2563, 2564, 2565, 2566, 2567, 2568, 2569, 2570, 2571, 2572, 2573, 2574, 2575, 2576, 2577, 2578 or a nucleotide sequence at least 70% (e.g., at least 75%, 80%, 85%, 90%, 92%, 95%, 97%, 98%, or 99%) identical thereto;
(ii) a nucleotide sequence of any one of SEQ ID NOs: 2562, 2579, or 5022, or a nucleotide sequence at least 70% (e.g., at least 75%, 80%, 85%, 90%, 92%, 95%, 97%, 98%, or 99%) identical thereto; or
(iii) the nucleotide sequence encoding the siRNA duplex comprises the nucleotide sequence of SEQ ID NO: 2562 or a nucleotide sequence at least 70% (e.g., at least 75%, 80%, 85%, 90%, 92%, 95%, 97%, 98%, or 99%) identical thereto.

39. The isolated AAV particle of any one of claims 1-38, which comprises a viral genome comprising a promoter operably linked to the nucleic acid sequence encoding the SOD1 targeting polynucleotide (e.g., a SOD1 targeting RNA agent, e.g., a siRNA duplex).

40. The isolated AAV particle of claim 39, the promoter comprises:
(i) a chicken β-actin (CBA) promoter and/or its derivative CAG, an EF-1a promoter, a CMV immediate-early enhancer and/or promoter, a β glucuronidase (GUSB) promoter, a ubiquitin C (UBC) promoter, a neuron-specific enolase (NSE), a platelet-derived growth factor (PDGF) promoter, a platelet-derived growth factor B-chain (PDGF-β) promoter, an intercellular adhesion molecule 2 (ICAM-2) promoter, a synapsin (Syn) promoter, a methyl-CpG binding protein 2 (MeCP2) promoter, a Ca2+/calmodulin-dependent protein kinase II (CaMKII) promoter, a metabotropic glutamate receptor 2 (mGluR2) promoter, a neurofilament light (NFL) or heavy (NFH) promoter, a β-globin minigene nβ2 promoter, a preproenkephalin (PPE) promoter, an enkephalin (Enk) and excitatory amino acid transporter 2 (EAAT2), a glial fibrillary acidic protein (GFAP) promoter, a myelin basic protein (MBP) promoter, a cardiovascular promoter (e.g., αMHC, cTnT, and CMV-MLC2k), a liver promoter (e.g., hAAT, TBG), a skeletal muscle promoter (e.g., desmin, MCK, C512) or a fragment, e.g., a truncation, or a functional variant thereof;
(ii) an EF-la promoter variant, e.g., a truncated EF-la promoter, a CBA promoter variant, e.g., a truncated CBA promoter, an insulin promoter variant, e.g., a truncated insulin promoter, or a SYN promoter variant, e.g., a truncated SYN promoter;
(iii) the nucleotide sequence of any one of SEQ ID NOs: 4000-4026, a nucleotide sequence comprising at least one, two, or three but no more than four modifications, e.g., substitutions (e.g., conservative substitutions), insertions, or deletions, relative to the nucleotide sequence of SEQ ID NOs: 4000-4026, or a nucleotide sequence with at least 80% (e.g., 85%, 90%, 95%, 96%, 97%, 98%, or 99%) sequence identity to any one of SEQ ID NOs: 4000-4026; or
(iv) a H1 promoter comprising SEQ ID NO: 128, or a nucleotide sequence with at least 80% (e.g., 85%, 90%, 95%, 96%, 97%, 98%, or 99%) sequence identity to SEQ ID NO: 128.

41. The isolated AAV particle of claim 39 or claim 40, wherein the viral genome further comprises a first exon, a second exon, or both a first exon and second exon, optionally wherein the first and/or second exon comprises the nucleotide sequence of any one of SEQ ID NO: 4045-4048, a nucleotide sequence comprising at least one, two, or three but no more than four modifications, e.g., substitutions, insertions, or deletions, relative to the nucleotide sequence of any one of SEQ ID NO: 4045-4048, or a nucleotide sequence with at least 80% (e.g., 85%, 90%, 95%, 96%, 97%, 98%, or 99%) sequence identity to any one of SEQ ID NO: 4045-4048.

42. The isolated AAV particle of claim 41, wherein the viral genome comprises both a first exon and a second exon, wherein:
(a) the first exon comprises the nucleotide sequence of SEQ ID NO: 4045 or 4046, a nucleotide sequence comprising at least one, two, or three but no more than four modifications, e.g., substitutions, insertions, or deletions, relative to the nucleotide sequence of SEQ ID NO: 4045 or 4046, or a nucleotide sequence with at least 80% (e.g., 85%, 90%, 95%, 96%, 97%, 98%, or 99%) sequence identity to SEQ ID NO: 4045 or 4046;
(b) the second exon comprises the nucleotide sequence of SEQ ID NO: 4047 or 4048, a nucleotide sequence comprising at least one, two, or three but no more than four modifications, e.g., substitutions, insertions, or deletions, relative to the nucleotide sequence of SEQ ID NO: 4047 or 4048, or a nucleotide sequence with at least 80% (e.g., 85%, 90%, 95%, 96%, 97%, 98%, or 99%) sequence identity to SEQ ID NO: 4047 or 4048;
(c) the first exon, second exon, or both are codon optimized; or
(d) the CpG sequences in the first exon, second exon, or both are depleted.

43. The isolated AAV particle of claim 41 or 42, wherein the viral genome comprises a first exon, an intron, and second exon (“exon-intron-exon cassette”), wherein the exon-intron-exon cassette comprises the nucleotide sequence of SEQ ID NO: 4042 or 4043, a nucleotide sequence comprising at least one, two, or three but no more than four modifications, e.g., substitutions, insertions, or deletions, relative to the nucleotide sequence of SEQ ID NO: 4042 or 4043, or a nucleotide sequence with at least 80% (e.g., 85%, 90%, 95%, 96%, 97%, 98%, or 99%) sequence identity to SEQ ID NO: 4042 or 4043, optionally
wherein
(i) the exon-intron-exon cassette is positioned 3′ relative to the promoter, and 5′ relative to the nucleotide sequence encoding the modulatory polynucleotide (e.g., a SOD1 targeting RNA agent, e.g., a siRNA duplex);
(ii) the nucleotide sequence encoding the modulatory polynucleotide (e.g., a SOD1 targeting RNA agent, e.g., a siRNA duplex) is located within (e.g., inserted into) the intron of the exon-intron-exon cassette; or
(iii) the nucleotide sequence encoding the modulatory polynucleotide (e.g., a SOD1 targeting RNA agent, e.g., a siRNA duplex) replaces a portion or all of the intron in the exon-intron-exon cassette.

44. The isolated AAV particle of any claims 39-43, wherein the viral genome further comprises:
(i) an inverted terminal repeat (ITR) sequence, optionally wherein ITR sequence is positioned 5′ relative to the encoded SOD1 targeting polynucleotide, and/or the ITR sequence is positioned 3′ relative to the encoded SOD1 targeting polynucleotide;
(ii) an enhancer;
(iii) a miR binding site;
(iv) a polyadenylation (polyA) signal region;
(v) an intron region;
(vi) an exon region, e.g., at least one, two, or three exon regions; or
(vii) a Kozak sequence.

45. The isolated AAV particle of any one of claims 39-44, wherein the viral genome further comprises a polyA signal region, optionally wherein the polyA signal region comprises SEQ ID NO:
129 or 4027, or a nucleotide sequence with at least 80% (e.g., 85%, 90%, 95%, 96%, 97%, 98%, or 99%) sequence identity to SEQ ID NO: 129 or 4027.

46. The isolated AAV particle of any one of 39-45, wherein the viral genome comprises, from 5′ to 3′:
(a) a 5′ ITR, e.g., a 5′ITR comprising the nucleotide sequence of SEQ ID NO: 126 or 130 or variant thereof,
(b) a promoter, e.g., a promoter comprising the nucleotide sequence of any one of SEQ ID NOs: 4000-4026 or variant thereof,
(c) an exon, e.g., an exon comprising the nucleotide sequence of any one of SEQ ID NOs: 4045-4048 or variant thereof,
(d) a nucleotide sequence encoding a modulatory polynucleotide (e.g., a SOD1 targeting RNA agent, e.g., a siRNA duplex), e.g., a modulatory polynucleotide comprising the nucleotide sequence of any one of SEQ ID NOs: 2559-2579 and 5022 or variant thereof,
(e) a polyA signal region, e.g., a polyA signal region comprising the nucleotide sequence of SEQ ID NO: 129 or 4027 or variant thereof, and
(f) a 3′ITR, e.g., a 3′ITR comprising the nucleotide sequence of SEQ ID NO: 126 or 130 or variant thereof,
wherein the variant of any of (a)-(f) comprises a sequence differing by no more than 15, 14, 13, 12, 11, 10, 9, 8, 7, 6, 5, 4, 3, 2 or 1 nucleotides, e.g., substitutions, insertions, or deletions, relative to the reference sequence, or a sequence with at least 70%, 75%, 80%, 85%, 90%, 95%, 99% or 100% identity, relative to the reference sequence, e.g., wherein the reference sequence is a wild-type sequence.

47. The isolated AAV particle of any one of claims 39-45, wherein the viral genome comprises, from 5′ to 3′:
(a) a 5′ ITR, e.g., a 5′ITR comprising the nucleotide sequence of SEQ ID NO: 126 or 130 or variant thereof,
(b) a promoter, e.g., a promoter comprising the nucleotide sequence of any one of SEQ ID NOs: 4000-4026 or variant thereof,
(c) a first exon, e.g., a first exon comprising the nucleotide sequence of any one of SEQ ID NOs: 4045-4048 or variant thereof,
(d) an intron, e.g., an intron comprising the nucleotide sequence of SEQ ID NO: 4044 or variant thereof,
(e) a nucleotide sequence encoding a modulatory polynucleotide (e.g., a SOD1 targeting RNA agent, e.g., a siRNA duplex), e.g., a SOD1 targeting polynucleotide comprising the nucleotide sequence of any one of SEQ ID NOs: 2559-2579 and 5022 or variant thereof,
(f) a poly A signal sequence, e.g., a poly A signal sequence comprising the nucleotide sequence of SEQ ID NO: 129 or 4027 or variant thereof, and
(g) a 3′ITR, e.g., a 3′ITR comprising the nucleotide sequence of SEQ ID NO: 126 or 130 or variant thereof,
wherein the variant comprises a sequence differing by no more than 15, 14, 13, 12, 11, 10, 9, 8, 7, 6, 5, 4, 3, 2 or 1 nucleotides, e.g., substitutions, insertions, or deletions, relative to the reference sequence, or a sequence with at least 70%, 75%, 80%, 85%, 90%, 95%, 99% or 100% identity relative to the reference sequence, e.g., wherein the reference sequence is a wild-type sequence.

48. The isolated AAV particle of any one of claims 39-45, wherein the viral genome comprises, from 5′ to 3′:
(a) a 5′ ITR, e.g., a 5′ITR comprising the nucleotide sequence of SEQ ID NO: 126 or 130 or variant thereof,
(b) a promoter, e.g., a promoter comprising the nucleotide sequence of any one of SEQ ID NOs: 4000-4026 or variant thereof,
(c) a first exon, e.g., a first exon comprising the nucleotide sequence of any one of SEQ ID NOs: 4045-4048 or variant thereof,
(d) an intron, e.g., an intron comprising the nucleotide sequence of SEQ ID NO: 4044 or variant thereof,
(e) a second exon, e.g., a second exon comprising the nucleotide sequence of any one of SEQ ID NOs: 4045-4048 or variant thereof,
(f) a nucleotide sequence encoding a modulatory polynucleotide (e.g., a SOD1 targeting RNA agent, e.g., a siRNA duplex), e.g., a SOD1 targeting polynucleotide comprising the nucleotide sequence of any one of SEQ ID NOs: 2559-2579 and 5022 or variant thereof,
(g) a poly A signal sequence, e.g., a poly A signal sequence comprising the nucleotide sequence of SEQ ID NO: 129 or 4027 or variant thereof, and
(h) a 3′ITR, e.g., a 3′ITR comprising the nucleotide sequence of SEQ ID NO: 126 or 130 or variant thereof,
wherein the variant comprises a sequence differing by no more than 15, 14, 13, 12, 11, 10, 9, 8, 7, 6, 5, 4, 3, 2 or 1 nucleotides, e.g., substitutions, insertions, or deletions, relative to the reference sequence, or a sequence with at least 70%, 75%, 80%, 85%, 90%, 95%, 99% or 100% identity relative to the reference sequence, e.g., wherein the reference sequence is a wild-type sequence.

49. The isolated AAV particle of any one of claims 39-45, wherein the viral genome comprises the nucleotide sequence of any one of SEQ ID NOs: 4028-4041, a nucleotide sequence differing by no more than 15, 14, 13, 12, 11, 10, 9, 8, 7, 6, 5, 4, 3, 2 or 1 nucleotides, e.g., substitutions, insertions, or deletions, relative to any one of SEQ ID NOs: 4028-4041, or a nucleotide sequence with at least 70%, 75%, 80%, 85%, 90%, 95%, 99% or 100% identity to any one of SEQ ID NOs: 4028-4041.

50. The isolated AAV particle of any one of claims 39-49, wherein the viral genome further comprises a nucleotide sequence encoding a miR binding site, e.g., a miR binding site that modulates, e.g., reduces, expression of the SOD1 targeting polynucleotide encoded by the viral genome in a cell or tissue where the corresponding miRNA is expressed, optionally wherein the encoded miRNA binding site is complementary, e.g., fully complementary or partially complementary, to a miRNA expressed in a cell or tissue of the DRG, liver, heart, hematopoietic, or a combination thereof, and wherein the encoded miR binding site modulates, e.g., reduces, expression of the encoded SOD1 targeting polynucleotide in a cell or tissue of the DRG, liver, heart, hematopoietic lineage, or a combination thereof.

51. The isolated AAV particle of claim 50, wherein the viral genome comprises
(i) at least 1-5 copies of the encoded miR binding site, e.g., at least 1, 2, 3, 4, or 5 copies;
(ii) at least 3 copies of an encoded miR binding sites, optionally wherein all three copies comprise the same miR binding site, or at least one, two, three, or all of the copies comprise a different miR binding site, optionally the at least 3 copies of the encoded miR binding sites are continuous (e.g., not separated by a spacer), or are separated by a spacer, optionally wherein the spacer comprises the nucleotide sequence GATAGTTA, or a nucleotide sequence having at least one, two, or three modifications, e.g., substitutions (e.g., conservative substitutions), but no more than four modifications, e.g., substitutions (e.g., conservative substitutions), relative to GATAGTTA.

52. The isolated AAV particle of claim 50 or claim 51, wherein the encoded miR binding site comprises a miR122 binding site, a miR183 binding site, a miR-1 binding site, a miR-142-3p, or a combination thereof, optionally wherein:
(i) the encoded miR122 binding site comprises the nucleotide sequence of SEQ ID NO: 1865, or a nucleotide sequence substantially identical (e.g., having at least 70%, 75%, 80%, 85%, 90%, 92%, 95%, 97%, 98%, or 99% sequence identity) thereto; or a nucleotide sequence having at least one, two, three, four, five, six, or seven modifications, e.g., substitutions (e.g., conservative substitutions), but no more than ten modifications, e.g., substitutions (e.g., conservative substitutions), relative to SEQ ID NO: 3672;
(ii) the encoded miR183 binding site comprises the nucleotide sequence of SEQ ID NO: 1847, or a nucleotide sequence substantially identical (e.g., having at least 70%, 75%, 80%, 85%, 90%, 92%, 95%, 97%, 98%, or 99% sequence identity) thereto; or a nucleotide sequence having at least one, two, three, four, five, six, or seven modifications, e.g., substitutions (e.g., conservative substitutions), but no more than ten modifications, e.g., substitutions (e.g., conservative substitutions), relative to SEQ ID NO: 3675;
(iii) the encoded miR-1 binding site comprises the nucleotide sequence of SEQ ID NO: 4679, or a nucleotide sequence substantially identical (e.g., having at least 70%, 75%, 80%, 85%, 90%, 92%, 95%, 97%, 98%, or 99% sequence identity) thereto; or a nucleotide sequence having at least one, two, three, four, five, six, or seven modifications, e.g., substitutions (e.g., conservative substitutions), but no more than ten modifications, e.g., substitutions (e.g., conservative substitutions), relative to SEQ ID NO: 4679; and/or
(iv) the encoded miR-142-3p binding site comprises the nucleotide sequence of SEQ ID NO: 1869, or a nucleotide sequence substantially identical (e.g., having at least 70%, 75%, 80%, 85%, 90%, 92%, 95%, 97%, 98%, or 99% sequence identity) thereto; or a nucleotide sequence having at least one, two, three, four, five, six, or seven modifications, e.g., substitutions (e.g., conservative substitutions), but no more than ten modifications, e.g., substitutions (e.g., conservative substitutions), relative to SEQ ID NO: 1869.

53. The isolated AAV particle of any one of claims 39-52, wherein the viral genome
(i) is single stranded or self-complementary;
(ii) further comprises a nucleotide sequence encoding a Rep protein, e.g., a non-structural protein, wherein the Rep protein comprises a Rep78 protein, a Rep68, Rep52 protein, and/or a Rep40 protein; and/or
(iii) further comprises a nucleic acid encoding a capsid protein, e.g., a structural protein, wherein the capsid protein comprises a VP1 polypeptide, a VP2 polypeptide, and/or a VP3 polypeptide, optionally wherein the VP1 polypeptide, the VP2 polypeptide, and/or the VP3 polypeptide are encoded by at least one Cap gene.

54. A cell, e.g., a host cell, comprising the AAV particle of any one of claims 1-53.

55. A method of making the AAV particle of any one of claims 1-53, comprising:
(i) providing a host cell comprising a viral genome; and
(ii) incubating the host cell under conditions suitable to enclose the viral genome in an AAV capsid variant, e.g., an AAV capsid variant described herein;
thereby making the AAV particle.

56. A pharmaceutical composition comprising the AAV particle of any one of claims 1-53, and a pharmaceutically acceptable excipient.

57. A method of delivering a SOD1 targeting polynucleotide to a subject, comprising administering an effective amount of the pharmaceutical composition of claim 56, or the AAV particle as described in any one of claims 1-53, thereby delivering the SOD1 targeting polynucleotide to the subject.

58. A method of treating a subject having or diagnosed with having a neurological disorder or a neurodegenerative disorder related to expression of SOD1, comprising administering to the subject an effective amount of the pharmaceutical composition of claim 56, or the AAV of any one claims 1-53.

59. The method of claim 58, wherein the disease or disorder comprises amyotrophic lateral sclerosis (ALS).

60. The method of claim 59, wherein the ALS is:
(i) familial ALS;
(ii) sporadic ALS;
(iii) early stage ALS;
(iv) middle stage ALS; and/or
(v) late stage ALS.

62. The method of claim 60 or claim 61, wherein treatment comprises amelioration of a symptom of ALS in the subject, optionally, wherein the symptom comprises motor neuron degeneration, muscle weakness, stiffness of muscles, muscle atrophy, muscle stiffness, fasciculation development, frontotemporal dementia, slurred speech, difficulty breathing, or a combination thereof.

63. The method of any one of 58-62, wherein the AAV particle is administered to the subject:
(i) intravenously, intracerebrally, via intrathalamic (ITH) administration, intramuscularly, intrathecally, intracerebroventricularly, via intraparenchymal administration, via focused ultrasound (FUS), e.g., coupled with the intravenous administration of microbubbles (FUS-MB), or MRI-guided FUS coupled with intravenous administration, via intra-cisterna magna injection (ICM), or via dual ITH and ICM administration; or
(ii) via intravenous administration, optionally wherein the intravenous administration is via focused ultrasound (FUS), e.g., coupled with the intravenous administration of microbubbles (FUS-MB), or MRI-guided FUS coupled with intravenous administration.

64. The method of any one of claims 57-63, wherein the AAV particle is administered to the subject at a dose of:
(a) about 6.7e11 VG/kg to 2e13 VG/kg (e.g., 6.7e11 VG/kg, 2e12 VG/kg, 6.7e12 VG/kg, or 2e13 VG/kg) or about 5e11 VG/kg to 3e13 VG/kg;
(b) about 6.7e10 VG/kg to 6.7e12 VG/kg, about 1.3e11 VG/kg to 3.4e12 VG/kg, or about 2.2e11 VG/kg to 2e12 VG/kg;
(c) about 4e11 VG/kg to 8e11 VG/kg (e.g., about 6.7e11 VG/kg);
(d) about 2e11 VG/kg to 2e13 VG/kg, about 4e11 VG/kg to 1e13 VG/kg, about 6.7e11 VG/kg to about 6e12 VG/kg;
(e) about 1e12 VG/kg to 5e12 VG/kg (e.g., about 2e12 VG/kg);
(f) about 6.7e11 VG/kg to 6.7e13 VG/kg, about 1.3e12 VG/kg to 3.4e13 VG/kg, or about 2.2e12 VG/kg to 2e13 VG/kg;
(g) about 4e12 VG/kg to 8e12 VG/kg (e.g., about 6.7e12 VG/kg);
(h) about 2e12 VG/kg to 2e14 VG/kg, about 4e12 VG/kg to 1e14 VG/kg, about 6.7e12 VG/kg to about 6e13 VG/kg; or
(i) about 1e13 VG/kg to 5e13 VG/kg (e.g., about 2e13 VG/kg).

65. Use of the pharmaceutical composition of claim 56, or the AAV particle of claims 1-53, in the manufacture of a medicament for treating a neurological disorder, a neurodegenerative disorder, a disease associated with SOD1 expression or activity.
